(19) United States
(12) Patent Application Publication
(10) Pub. No.: US 2022/0257677 A1
(43) Pub. Date: Aug. 18, 2022

(54) ENGINEERED ADENO-ASSOCIATED VIRUS CAPSIDS

(71) Applicants: THE BROAD INSTITUTE, INC., CAMBRIDGE, MA (US); PRESIDENT AND FELLOWS OF HARVARD COLLEGE, CAMBRIDGE, MA (US); MASSACHUSETTS INSTITUTE OF TECHNOLOGY, CAMBRIDGE, MA (US)

(72) Inventors: Pardis SABETI, CAMBRIDGE, MA (US); Mohammadsharif TABEBORDBAR, CAMBRIDGE, MA (US); Simon YE, CAMBRIDGE, MA (US)

(21) Appl. No.: 17/707,951

(22) Filed: Mar. 30, 2022

Related U.S. Application Data
(63) Continuation of application No. 17/642,541.
(60) Provisional application No. 62/899,453, filed on Sep. 12, 2019.
(60) Provisional application No. 62/916,185, filed on Oct. 16, 2019.

(51) Int. Cl. A61K 35/76; C12N 15/86; C12N 7/00; C07K 14/005

(52) U.S. Cl. CPC A61K 35/76; C12N 15/86; C12N 7/00; C07K 14/005; A61K 48/00; C12N 2750/14142; C12N 2320/32; C12N 2750/14171; C12N 2750/14122

(57) ABSTRACT

Described herein are methods of generating engineered viral capsid variants. Also described herein are engineered viral capsid variants, engineered viral particles and formulations and cells thereof. Also described herein are vector systems containing an engineered viral capsid polynucleotide and uses thereof.

### CROSS-REFERENCE TO RELATED APPLICATIONS

[0001] This application is a continuation of U.S. patent application Ser. No. 17/642,541, filed on Mar. 11, 2022, which is the U.S. National Stage Application under 35 U.S.C. § 371 of Patent Cooperation Treaty Application No.: PCT/US2020/050534, filed on Sep. 11, 2020. Patent Cooperation Treaty Application No.: PCT/US2020/050534 claims the benefit of and priority to U.S. Provisional Patent Application No. 62/899,453, filed on Sep. 12, 2019 and U.S. Provisional Patent Application No. 62/916,185, filed on Oct. 16, 2019. The entire contents of the above-identified applications are hereby fully incorporated herein by reference.

### SEQUENCE LISTING

[0002] This application contains a sequence listing filed in electronic form as an ASCII.txt file entitled BROD-4400WP_ST25.txt, created on Sep. 11, 2020 and having a size of 1.6 MB. The content of the sequence listing is incorporated herein in its entirety.

### TECHNICAL FIELD

[0003] The subject matter disclosed herein is generally directed to recombinant adeno-associated virus (AAV) vectors and systems thereof, compositions, and uses thereof.

### BACKGROUND

[0004] Recombinant AAVs (rAAVs) are the most commonly used delivery vehicles for gene therapy and gene editing. Nonetheless, rAAVs that contain natural capsid variants have limited cell tropism. Indeed, rAAVs used today mainly infect the liver after systemic delivery. Further, the transduction efficiency of conventional rAAVs in other cell-types, tissues, and organs by these conventional rAAVs with natural capsid variants is limited. Therefore, AAV-mediated polynucleotide delivery for diseased that affect cells, tissues, and organs other than the liver (e.g. nervous system, skeletal muscle, and cardiac muscle) typically requires an injection of a large dose of virus (typically about 1×10¹⁴ vg/kg), which often results in liver toxicity. Furthermore, because large doses are required when using conventional rAAVs, manufacturing sufficient amounts of a therapeutic rAAV needed to dose adult patients is extremely challenging. Additionally, due to differences in gene expression and physiology, mouse and primate models respond differently to viral capsids. Transduction efficiency of different virus particles varies between different species, and as a result, preclinical studies in mice often do not accurately reflect results in primates, including humans. As such there exists a need for improved rAAVs for use in the treatment of various genetic diseases.

### SUMMARY

[0005] In certain example embodiments, provided herein are various embodiments of engineered adeno-associated virus (AAV) capsids that can be engineered to confer cell-specific tropism to an engineered AAV particle. The engineered capsids can be included in an engineered virus particle and can confer cell-specific tropism, reduced immunogenicity, or both to the engineered AAV particle. The engineered AAV capsids described herein can include one or more engineered AAV capsid proteins described herein. The engineered AAV capsid and/or capsid proteins can be encoded by one or more engineered AAV capsid polynucleotides. In some embodiments, an engineered AAV capsid polynucleotide can include a 3′ polyadenylation signal. The polyadenylation signal can be an SV40 polyadenylation signal. In some embodiments, the engineered AAV capsid protein can have an n-mer amino acid motif, where n can be at least 3 amino acids. In some embodiments, n can be 3, 4, 5, 6, 7, 8, 9, 10, 11, 12, 13, 14, or 15 amino acids.

[0006] In certain example embodiments, also provided herein are methods of generating engineered AAV capsids. In some embodiments, the method of generating an AAV capsid variant can include the steps of (a) expressing a vector system described herein that contains an engineered AAV capsid polynucleotide in a cell to produce engineered AAV virus particle capsid variants; (b) harvesting the engineered AAV virus particle capsid variants produced in step (a); (c) administering engineered AAV virus particle capsid variants to one or more first subjects, wherein the engineered AAV virus particle capsid variants are produced by expressing an engineered AAV capsid variant vector or system thereof in a cell and harvesting the engineered AAV virus particle capsid variants produced by the cell; and (d) identifying one or more engineered AAV virus particle capsid particle variants produced at a significantly high level by one or more specific cells or specific cell types in the one or more first subjects. The method can further include the steps of (e) administering some or all engineered AAV virus particle capsid variants identified in step (d) to one or more second subjects; and (f) identifying one or more engineered AAV virus particle capsid variants produced at a significantly high level in one or more specific cells or specific cell types in the one or more second subjects. The cell in step (a) can be a prokaryotic cell or a eukaryotic cell. In some embodiments, the administration in step (c), step (e), or both is systemic. In some embodiments, one or more first subjects, one or more second subjects, or both, are non-human mammals. In some embodiments, one or more first subjects, one or more second subjects, or both, are each independently selected from the group consisting of a wild-type non-human mammal, a humanized non-human mammal, a disease-specific non-human mammal model, and a non-human primate.

[0007] In certain example embodiments, also provided herein are vectors and vector systems that can contain one or more of the engineered AAV capsid polynucleotides described herein. As used in this context, engineered AAV capsid polynucleotides refers to any one or more of the polynucleotides described herein capable of encoding an engineered AAV capsid as described elsewhere herein and/or polynucleotide(s) capable of encoding one or more engineered AAV capsid proteins described elsewhere herein. Further, where the vector includes an engineered AAV capsid polynucleotide described herein, the vector can also be referred to and considered an engineered vector or system thereof although not specifically noted as such. In embodiments, the vector can contain one or more polynucleotides encoding one or more elements of an engineered AAV capsid described herein. In some embodiments, one or more of the polynucleotides that are part of the engineered AAV capsid and system thereof described herein can be included in a vector or vector system.

[0008] In certain example embodiments, the vector can include an engineered AAV capsid polynucleotide having a 3′ polyadenylation signal. In some embodiments, the 3′ polyadenylation is an SV40 polyadenylation signal. In some embodiments, the vector does not have splice regulatory elements. In some embodiments, the vector includes one or more minimal splice regulatory elements. In some embodiments, the vector can further include a modified splice regulatory element, wherein the modification inactivates the splice regulatory element. In some embodiments, the modified splice regulatory element is a polynucleotide sequence sufficient to induce splicing between a rep protein polynucleotide and the engineered AAV capsid protein variant polynucleotide. In some embodiments, the polynucleotide sequence can be sufficient to induce splicing is a splice acceptor or a splice donor. In some embodiments, the AAV capsid polynucleotide is an engineered AAV capsid polynucleotide as described elsewhere herein. In some exemplary embodiments, the vectors and/or vector systems can be used, for example, to express one or more of the engineered AAV capsid polynucleotides in a cell, such as a producer cell, to produce engineered AAV particles containing an engineered AAV capsid described elsewhere herein.

[0009] In certain example embodiments, also provided herein are engineered AAV capsid virus particles that can contain an engineered AAV capsid as described in detail elsewhere herein. An engineered AAV capsid is one that that contains one or more engineered AAV capsid proteins as are described elsewhere herein. In some embodiments, the engineered AAV particles can include 1-60 engineered AAV capsid proteins described herein. In some embodiments, the engineered AAV capsid can confer a cell-cell specific tropism, reduce immunogenicity, or both to the engineered AAV capsid virus particle. The engineered AAV capsid virus particle can include one or more cargo polynucleotides. In some embodiments, the engineered AAV capsid virus particle described herein can be used to deliver a cargo polynucleotide to a cell. In some embodiments, the cargo polynucleotide is a gene modification polynucleotide. In some embodiments, the cargo polynucleotide is a component or encodes a component of a CRSIPR-Cas system.

[0010] In certain example embodiments, also provided herein are engineered cells that can include one or more of the engineered AAV capsid polynucleotides, polypeptides, vectors, and/or vector systems. In some embodiments, one or more of the engineered AAV capsid polynucleotides can be expressed in the engineered cells. In some embodiments, the engineered cells can be capable of producing engineered AAV capsid proteins and/or engineered AAV capsid particles that are described elsewhere herein.

[0011] In certain example embodiments, also provided herein are modified or engineered organisms that can include one or more engineered cells described herein.

[0012] In certain example embodiments, component(s) of the engineered AAV capsid system, engineered cells, engineered AAV capsid particles, and/or combinations thereof can be included in a formulation that can be delivered to a subject or a cell. In certain example embodiments, also provided herein are pharmaceutical formulations containing an amount of one or more of the engineered AAV capsid polypeptides, polynucleotides, vectors, cells, or combinations thereof described herein.

[0013] In certain example embodiments, also provided herein are kits that contain one or more of the one or more of the engineered AAV capsid polypeptides, polynucleotides, vectors, cells, or other components described herein, or a combination thereof, or one or more pharmaceutical formulations described herein. In some exemplary embodiments, one or more of the polypeptides, polynucleotides, vectors, cells, and combinations thereof described herein can be presented as a combination kit.

[0014] In certain example embodiments, provided herein are methods of using the engineered AAV capsid variants, virus particles, cells and formulations thereof. In some exemplary embodiments, the engineered AAV capsid system polynucleotides, polypeptides, vector(s), engineered cells, engineered AAV capsid particles can be used generally to package and/or deliver one or more cargo polynucleotides to a recipient cell. In some exemplary embodiments, delivery is done in cell-specific manner based upon the tropism of the engineered AAV capsid.

[0015] In some exemplary embodiments, provided herein are methods of using the engineered AAV capsid polynucleotides, vectors, and systems thereof to generate engineered AAV capsid variant libraries that can be mined for variants with a desired cell-specificity.

[0016] In some exemplary embodiments, provided herein are methods using the engineered AAV capsid variants to deliver a therapeutic cargo polynucleotide to a subject in need thereof. In some embodiments, the therapeutic cargo polynucleotide can be and/or encode a component of a CRISPR-Cas system. In some embodiments, the subject in need thereof can have a disease having a genetic or epigenetic embodiments. In some embodiments, the subject in need thereof can have a muscle disease.

[0017] In some exemplary embodiments, provided herein are methods of using the engineered AAV capsid virus particles to deliver a cargo polynucleotide capable of modifying a recipient cell to the recipient cell for use in adoptive cell therapy. In some exemplary embodiments, the recipient cell is a T cell. In some exemplary embodiments, the recipient cell is a B cell. In some exemplary embodiments, the cell is a CAR T cell.

[0018] In some exemplary embodiments, provided herein are methods of using the engineered AAV capsid virus particles to deliver a cargo polynucleotide capable of modifying a recipient cell to create a gene drive in the recipient cell.

[0019] In some exemplary embodiments, provided herein are methods of using the engineered AAV capsid virus particles to deliver a cargo polynucleotide capable of modifying recipient cells, tissues, and/or organs for transplantation.

[0020] Described in certain example embodiments herein are vectors comprising: an adeno-associated (AAV) capsid protein polynucleotide, wherein the AAV capsid protein polynucleotide comprises a 3′ polyadenylation signal.

[0021] In certain example embodiments, the vector does not comprise splice regulatory elements.

[0022] In certain example embodiments, the vector comprises minimal splice regulatory elements.

[0023] In certain example embodiments, the vector further comprises a modified splice regulatory element, wherein the modification inactivates the splice regulatory element.

[0024] In certain example embodiments, the modified splice regulatory element is a polynucleotide sequence sufficient to induce splicing, between a rep protein polynucleotide and the capsid protein polynucleotide.

[0025] In certain example embodiments, the polynucleotide sequence sufficient to induce splicing is a splice acceptor or a splice donor.

[0026] In certain example embodiments, the polyadenylation signal is an SV40 polyadenylation signal.

[0027] In certain example embodiments, the AAV capsid polynucleotide is an engineered AAV capsid polynucleotide.

[0028] In certain example embodiments, the engineered AAV capsid polynucleotide comprises a n-mer motif polynucleotide capable of encoding an n-mer amino acid motif, wherein the n-mer motif comprises three or more amino acids, wherein the n-mer motif polynucleotide is inserted between two codons in the AAV capsid polynucleotide within a region of the AAV capsid polynucleotide capable of encoding a capsid surface.

[0029] In certain example embodiments, the n-mer motif comprises 3-15 amino acids.

[0030] In certain example embodiments, the n-mer motif is 6 or 7 amino acids.

[0031] In certain example embodiments, the n-mer motif polynucleotide is inserted between the codons corresponding to any two contiguous amino acids between amino acids 262-269, 327-332, 382-386, 452-460, 488-505, 527-539, 545-558, 581-593, 704-714, or any combination thereof in an AAV9 capsid polynucleotide or in an analogous position in an AAV2, AAV3, AAV4, AAVS, AAV6, AAV7, AAV8 capsid polynucleotide.

[0032] In certain example embodiments, the n-mer motif polynucleotide is inserted between the codons corresponding to aa588 and 589 in the AAV9 capsid polynucleotide.

[0033] In certain example embodiments, the vector is capable of producing AAV virus particles having increased specificity, reduced immunogenicity, or both.

[0034] In certain example embodiments, the vector is capable of producing AAV virus particles having increased muscle cell, specificity, reduced immunogenicity, or both.

[0035] In certain example embodiments, the n-mer motif polynucleotide is any polynucleotide in any of Tables 1-6.

[0036] In certain example embodiments, the n-mer motif polynucleotide is capable of encoding a peptide as in any of Tables 1-6.

[0037] In certain example embodiments, the n-mer motif polynucleotide is capable of encoding three or more amino acids, wherein the first three amino acids are RGD.

[0038] In certain example embodiments, the n-mer motif has a polypeptide sequence of RGD or RGDXₙ, where n is 3-15 amino acids and X, where each amino acid present are independently selected from the others from the group of any amino acid.

[0039] In certain example embodiments, the vector is capable of producing an AAV capsid polypeptide, AAV capsid, or both that have a muscle-specific tropism.

[0040] Described in certain example embodiments herein are vector systems comprising:
[0041] a vector as in any one of paragraphs [0020]-[0039] and as described elsewhere herein; an AAV rep protein polynucleotide or portion thereof; and a single promoter operably coupled to the AAV capsid protein, AAV rep protein, or both, wherein the single promoter is the only promoter operably coupled to the AAV capsid protein, AAV rep protein, or both.

[0042] Described in certain example embodiments herein, are vector systems comprising a vector as in any one of paragraphs [0020]-[0039]; and an AAV rep protein polynucleotide or portion thereof.

[0043] In certain example embodiments, the vector system further comprises a first promoter, wherein the first promoter is operably coupled to the AAV capsid protein, AAV rep protein, or both.

[0044] In certain example embodiments, the first promoter or the single promoter is a cell-specific promoter.

[0045] In certain example embodiments, the first promoter is capable of driving high-titer viral production in the absence of an endogenous AAV promoter.

[0046] In certain example embodiments, the endogenous AAV promoter is p40.

[0047] In certain example embodiments, the AAV rep protein polynucleotide is operably coupled to the AAV capsid protein.

[0048] In certain example embodiments, the AAV protein polynucleotide is part of the same vector as the AAV capsid protein polynucleotide.

[0049] In certain example embodiments, the AAV protein polynucleotide is on a different vector as the AAV capsid protein polynucleotide.

[0050] Described in example embodiments herein are polypeptides encoded by a vector of any one of paragraphs [0020]-[0039] or by a vector system of any one of paragraphs [0040]-[0048].

[0051] Described in example embodiments herein are cells comprising: a vector of any one of paragraphs [0020]-[0039], a vector system of any one of paragraphs [0040]-[0048], a polypeptide as in paragraph [0049], or any combination thereof.

[0052] In certain example embodiments, the cell is prokaryotic.

[0053] In certain example embodiments, the cell is eukaryotic.

[0054] Described in certain example embodiments herein are engineered adeno-associated virus particle produced by the method comprising: expressing a vector as in any of paragraphs [0020]-[0039], a vector system as in any one of paragraphs [0040]-[0048], or both in a cell.

[0055] In certain example embodiments, the step of expressing the vector system occurs in vitro or ex vivo.

[0056] In certain example embodiments, the step of expressing the vector system occurs in vivo.

[0057] Described in certain example embodiments herein are methods of identifying cell-specific adeno-associated virus (AAV) capsid variants, comprising:
[0058] (a) expressing a vector system as in any one of paragraphs [0020]-[0039] in a cell to produce AAV engineered virus particle capsid variants;
[0059] (b) harvesting the engineered AAV virus particle capsid variants produced in step (a);
[0060] (c) administering engineered AAV virus particle capsid variants to one or more first subjects, wherein the engineered AAV virus particle capsid variants are produced by expressing a vector system as in any one of paragraphs [0020]-[0039] in a cell and harvesting the engineered AAV virus particle capsid variants produced by the cell; and
[0061] (d) identifying one or more engineered AAV capsid variants produced at a significantly high level by one or more specific cells or specific cell types in the one or more first subjects.

[0062] In certain example embodiments, the method further comprises
[0063] (e) administering some or all engineered AAV virus particle capsid variants identified in step (d) to one or more second subjects; and
[0064] (f) identifying one or more engineered AAV virus particle capsid variants produced at a significantly high level in one or more specific cells or specific cell types in the one or more second subjects.

[0065] In certain example embodiments, the cell is a prokaryotic cell.

[0066] In certain example embodiments, cell is a eukaryotic cell.

[0067] In certain example embodiments, administration in step (c), step (e), or both is systemic.

[0068] In certain example embodiments, the one or more first subjects, one or more second subjects, or both, are non-human mammals.

[0069] In certain example embodiments, the one or more first subjects, one or more second subjects, or both, are each independently selected from the group consisting of: a wild-type non-human mammal, a humanized non-human mammal, a disease-specific non-human mammal model, and a non-human primate.

[0070] Described in certain example embodiments herein are vector systems comprising a vector comprising a cell-specific capsid polynucleotide, wherein the cell-specific capsid polynucleotide encodes a cell-specific capsid protein; and optionally, a regulatory element operatively coupled to the cell-specific capsid polynucleotide.

[0071] In certain example embodiments herein, the cell-specific capsid polynucleotide is identified by a method as in any one of paragraphs [0056]-[0062] and as further described elsewhere herein.

[0072] In certain example embodiments, the vector system further comprises a cargo.

[0073] In certain example embodiments, the cargo is a cargo polynucleotide encodes a gene-modification molecule, a non-gene modification polypeptide, a non-gene modification RNA, or a combination thereof.

[0074] In certain example embodiments, the cargo polynucleotide is present on the same vector or a different vector than the cell-specific capsid polynucleotide.

[0075] In certain example embodiments, the vector system is capable of producing a cell-specific capsid polynucleotide and/or polypeptide.

[0076] In certain example embodiments, the cell-specific capsid polynucleotide is a cell-specific adeno-associated virus (AAV) capsid polynucleotide that encodes a cell-specific AAV capsid polypeptide.

[0077] In certain example embodiments, the vector system is capable of producing virus particles comprising the cell-specific capsid protein and that further comprise the cargo when present.

[0078] In certain example embodiments, the viral particles are AAV viral particles.

[0079] In certain example embodiments, the viral particles are engineered AAV1, AAV2, AAV3, AAV4, AAV5, AAV6, AAV7, AAV8, AAV9, AAV rh.74, or AAV rh.10 viral particles.

[0080] In certain example embodiments, the cell-specific viral capsid polypeptide is a cell-specific AAV capsid polypeptide.

[0081] In certain example embodiments, the cell-specific AAV capsid polypeptide is an engineered AAV1, AAV2, AAV3, AAV4, AAV5, AAV6, AAV7, AAV8, AAV9, AAV rh.74, or AAV rh.10 capsid polypeptide.

[0082] In certain example embodiments, the cell-specific capsid polynucleotide does not comprise splice regulatory elements.

[0083] In certain example embodiments, the vector further comprises a viral rep protein.

[0084] In certain example embodiments, the viral rep protein is an AAV viral rep protein.

[0085] In certain example embodiments, the viral rep protein is on the same vector as or a different vector from the cell-specific capsid polynucleotide.

[0086] In certain example embodiments, the viral rep protein is operatively coupled to a regulatory element.

[0087] Described in certain example embodiments herein are polypeptides that are produced by the vector system as in any one of paragraphs [0063]-[0079].

[0088] Described in certain example embodiments herein are cells comprising the vector system as in any one of paragraphs [0063]-[0079] or the polypeptide of paragraph [0080].

[0089] In certain example embodiments, the cell is a prokaryotic.

[0090] In certain example embodiments, the cell is a eukaryotic cell.

[0091] Described in certain example embodiments herein are engineered virus particles comprising: a cell-specific capsid, wherein the cell-specific capsid is encoded by a cell-specific capsid polynucleotide of the vector system of any one of paragraphs [0063]-[0079].

[0092] In certain example embodiments, the engineered virus particle further comprises a cargo molecule, wherein the cargo molecule is encoded by a cargo polynucleotide of the vector system of any one of paragraphs [0065]-[0079].

[0093] In certain example embodiments, the cargo molecule is a gene modification molecule, a non-gene modification polypeptide, a non-gene modification RNA, or a combination thereof.

[0094] In certain example embodiments, the engineered virus particle is an engineered adeno-associated virus particle.

[0095] Described in certain example embodiments herein are engineered virus particles produced by the method comprising: expressing a vector system as in any one of paragraphs [0063]-[0079] in a cell.

[0096] Described in certain example embodiments herein are pharmaceutical formulations comprising: a vector system as in any one of paragraphs [0063]-[0079], a polypeptide as in paragraph [0080], a cell as in any one of paragraphs [081-0083], an engineered virus particle as in any one of paragraphs [0084]-[0087], or a combination thereof; and a pharmaceutically acceptable carrier.

[0097] Described in certain example embodiments herein are methods comprising administering a vector system as in any one of paragraphs [0063]-[0079], a polypeptide as in paragraph [0080], a cell as in any one of paragraphs [081-0083], an engineered virus particle as in any one of paragraphs [0084]-[0087], a pharmaceutical formulation as in claim 70, or a combination thereof to a subject.

[0098] These and other embodiments, objects, features, and advantages of the example embodiments will become apparent to those having ordinary skill in the art upon consideration of the following detailed description of illustrated example embodiments.

### BRIEF DESCRIPTION OF THE DRAWINGS

[0099] An understanding of the features and advantages of the present invention will be obtained by reference to the following detailed description that sets forth illustrative embodiments, in which the principles of the invention may be utilized, and the accompanying drawings of which:

[0100] FIG. 1 demonstrates the adeno-associated virus (AAV) transduction mechanism, which results in production of mRNA from the transgene.

[0101] FIG. 2 shows a graph that can demonstrate that mRNA-based selection of AAV variants can be more stringent than DNA-based selection. The virus library was expressed under the control of a CMV promoter.

[0102] FIGS. 3A-3B show graphs that can demonstrate a correlation between the virus library and vector genome DNA (FIG. 3A) and mRNA (FIG. 3B) in the liver.

[0103] FIGS. 4A-4F show graphs that can demonstrate capsid variants present at the DNA level, and expressed at the mRNA level identified in different tissues. For this experiment, the virus library was expressed under the control of a CMV promoter.

[0104] FIGS. 5A-5C show graphs that can demonstrate capsid mRNA expression in different tissues under the control of cell-type specific promoters (as noted on x-axis). CMV was included as an exemplary constitutive promoter. CK8 is a muscle-specific promoter. MHCK7 is a muscle-specific promoter. hSyn is a neuron specific promoter. Expression levels from the cell type-specific promoters have been normalized based on expression levels from the constitutive CMV promoter in each tissue.

[0105] FIG. 6 shows a schematic demonstrating embodiments of a method of producing and selecting capsid variants for tissue-specific gene delivery across species.

[0106] FIG. 7 shows a schematic demonstrating embodiments of generating an AAV capsid variant library, particularly insertion of a random n-mer (n=3-15 amino acids) into a wild-type AAV, e.g. AAV9.

[0107] FIG. 8 shows a schematic demonstrating embodiments of generating an AAV capsid variant library, particularly variant AAV particle production. Each capsid variant encapsulates its own coding sequence as the vector genome.

[0108] FIG. 9 shows schematic vector maps of representative AAV capsid plasmid library vectors (see e.g. FIG. 8) that can be used in an AAV vector system to generate an AAV capsid variant library.

[0109] FIG. 10 shows a graph that demonstrates the viral titer (calculated as AAV9 vector genome/15 cm dish) produced by constructs containing different constitutive and cell-type specific mammalian promoters.

[0110] FIGS. 11A-11C show graphs (FIGS. 11A and 11C) and schematic (FIG. 11B) that demonstrate the correlation between the amount of plasmid library vector used for virus library production and cross-packaging. FIG. 11A can demonstrate the effect of the plasmid library vector amount on virus titer. FIG. 11B can demonstrate the nucleotide sequence of the random n-mer (FIG. 11C shows by way of example a 7-mer) as inserted between the codon for aa588 and aa 589 of wild-type AAV9. Each X indicates an amino acid. N indicates any nucleotide (G, A, T, C). K indicates that the nucleotide at that position is T or G. FIG. 11C can demonstrate the effect of the plasmid library vector amount on % reads containing a STOP codon.

[0111] FIGS. 12A-12F show graphs that demonstrate the results obtained after the first round of selection in C57BL/6 mice using a capsid library expressed under the control of the MHCK7 muscle-specific promoter.

[0112] FIGS. 13A-13D show graphs that demonstrate the results obtained after the second round of selection in C57BL/6 mice using a capsid library expressed under the control of the MHCK7 muscle-specific promoter.

[0113] FIGS. 14A-14B shows graphs that demonstrate a correlation between the abundance of variants encoded by synonymous codons.

[0114] FIG. 15 shows a graph that can demonstrate a correlation between the abundance of the same variants expressed under the control of two different muscle specific promoters (MHCK7 and CK8).

[0115] FIG. 16 shows a graph that can demonstrate muscle-tropic capsid variants that produce rAAV with similar titers to wild-type AAV9 capsid.

[0116] FIG. 17 shows images that can demonstrate a comparison of mouse tissue transduction between rAAV9-GFP and rMyoAAV-GFP.

[0117] FIG. 18 shows a panel of images that can demonstrate a comparison of mouse tissue transduction between rAAV9-GFP and rMyoAAV-G.

[0118] FIG. 19 shows a panel of images that can demonstrate a comparison of mouse tissue transduction between rAAV9-GFP and rMyoAAV-GF.

[0119] FIG. 20 shows a schematic of selection of potent capsid variants for muscle-directed gene delivery across species.

[0120] FIGS. 21A-21C show tables that can demonstrate selection in different strains of mice identifies the same variants as the top muscle-tropic hits.

[0121] The figures herein are for illustrative purposes only and are not necessarily drawn to scale.

### DETAILED DESCRIPTION OF THE EXAMPLE EMBODIMENTS

### General Definitions

[0122] Unless defined otherwise, technical and scientific terms used herein have the same meaning as commonly understood by one of ordinary skill in the art to which this disclosure pertains. Definitions of common terms and techniques in molecular biology may be found in Molecular Cloning: A Laboratory Manual, 2^{nd} edition (1989) (Sambrook, Fritsch, and Maniatis); Molecular Cloning: A Laboratory Manual, 4^{th} edition (2012) (Green and Sambrook); Current Protocols in Molecular Biology (1987) (F. M. Ausubel et al. eds.); the series Methods in Enzymology (Academic Press, Inc.): PCR 2: A Practical Approach (1995) (M. J. MacPherson, B. D. Hames, and G. R. Taylor eds.): Antibodies, A Laboratory Manual (1988) (Harlow and Lane, eds.): Antibodies A Laboratory Manual, 2^{nd} edition 2013 (E. A. Greenfield ed.); Animal Cell Culture (1987) (R. I. Freshney, ed.); Benjamin Lewin, Genes IX, published by Jones and Bartlet, 2008 (ISBN 0763752223); Kendrew et al. (eds.), The Encyclopedia of Molecular Biology, published by Blackwell Science Ltd., 1994 (ISBN 0632021829); Robert A. Meyers (ed.), Molecular Biology and Biotechnology: a Comprehensive Desk Reference, published by VCH Publishers, Inc., 1995 (ISBN 9780471185710); Singleton et al., Dictionary of Microbiology and Molecular Biology 2nd ed., J. Wiley & Sons (New York, N.Y. 1994), March, Advanced Organic Chemistry Reactions, Mechanisms and Structure 4th ed., John Wiley & Sons (New York, N.Y. 1992); and Marten H. Hofker and Jan van Deursen, Transgenic Mouse Methods and Protocols, 2^{nd} edition (2011).

[0123] As used herein, the singular forms “a”, “an”, and “the” include both singular and plural referents unless the context clearly dictates otherwise.

[0124] The term “optional” or “optionally” means that the subsequent described event, circumstance or substituent may or may not occur, and that the description includes instances where the event or circumstance occurs and instances where it does not.

[0125] The recitation of numerical ranges by endpoints includes all numbers and fractions subsumed within the respective ranges, as well as the recited endpoints. It will be further understood that the endpoints of each of the ranges are significant both in relation to the other endpoint, and independently of the other endpoint. It is also understood that there are a number of values disclosed herein, and that each value is also herein disclosed as “about” that particular value in addition to the value itself. For example, if the value “10” is disclosed, then “about 10” is also disclosed. Ranges can be expressed herein as from “about” one particular value, and/or to “about” another particular value. Similarly, when values are expressed as approximations, by use of the antecedent “about,” it will be understood that the particular value forms a further embodiment. For example, if the value “about 10” is disclosed, then “10” is also disclosed.

[0126] It is to be understood that such a range format is used for convenience and brevity, and thus, should be interpreted in a flexible manner to include not only the numerical values explicitly recited as the limits of the range, but also to include all the individual numerical values or sub-ranges encompassed within that range as if each numerical value and sub-range is explicitly recited. To illustrate, a numerical range of “about 0.1% to 5%” should be interpreted to include not only the explicitly recited values of about 0.1% to about 5%, but also include individual values (e.g., about 1%, about 2%, about 3%, and about 4%) and the sub-ranges (e.g., about 0.5% to about 1.1%; about 5% to about 2.4%; about 0.5% to about 3.2%, and about 0.5% to about 4.4%, and other possible sub-ranges) within the indicated range. Where a range is expressed, a further embodiment includes from the one particular value and/or to the other particular value.

[0127] Where a range of values is provided, it is understood that each intervening value, to the tenth of the unit of the lower limit unless the context clearly dictates otherwise, between the upper and lower limit of that range and any other stated or intervening value in that stated range, is encompassed within the disclosure. The upper and lower limits of these smaller ranges may independently be included in the smaller ranges and are also encompassed within the disclosure, subject to any specifically excluded limit in the stated range. Where the stated range includes one or both of the limits, ranges excluding either or both of those included limits are also included in the disclosure. For example, where the stated range includes one or both of the limits, ranges excluding either or both of those included limits are also included in the disclosure, e.g. the phrase “x to y” includes the range from ‘x’ to ‘y’ as well as the range greater than ‘x’ and less than ‘y’. The range can also be expressed as an upper limit, e.g. ‘about x, y, z, or less’ and should be interpreted to include the specific ranges of ‘about x’, ‘about y’, and ‘about z’ as well as the ranges of ‘less than x’, less than y′, and ‘less than z’. Likewise, the phrase ‘about x, y, z, or greater’ should be interpreted to include the specific ranges of ‘about x’, ‘about y’, and ‘about z’ as well as the ranges of ‘greater than x’, greater than y′, and ‘greater than z’. In addition, the phrase “about ‘x’ to ‘y’”, where ‘x’ and ‘y’ are numerical values, includes “about ‘x’ to about ‘y’”.

[0128] The terms “about” or “approximately” as used herein when referring to a measurable value such as a parameter, an amount, a temporal duration, and the like, are meant to encompass variations of and from the specified value, such as variations of +/−10% or less, +/−5% or less, +/−1% or less, and +/−0.1% or less of and from the specified value, insofar such variations are appropriate to perform in the disclosed invention. It is to be understood that the value to which the modifier “about” or “approximately” refers is itself also specifically, and preferably, disclosed. As used herein, the terms “about,” “approximate,” “at or about,” and “substantially” can mean that the amount or value in question can be the exact value or a value that provides equivalent results or effects as recited in the claims or taught herein. That is, it is understood that amounts, sizes, formulations, parameters, and other quantities and characteristics are not and need not be exact, but may be approximate and/or larger or smaller, as desired, reflecting tolerances, conversion factors, rounding off, measurement error and the like, and other factors known to those of skill in the art such that equivalent results or effects are obtained. In some circumstances, the value that provides equivalent results or effects cannot be reasonably determined. In general, an amount, size, formulation, parameter or other quantity or characteristic is “about,” “approximate,” or “at or about” whether or not expressly stated to be such. It is understood that where “about,” “approximate,” or “at or about” is used before a quantitative value, the parameter also includes the specific quantitative value itself, unless specifically stated otherwise.

[0129] As used herein, a “biological sample” may contain whole cells and/or live cells and/or cell debris. The biological sample may contain (or be derived from) a “bodily fluid”. The present invention encompasses embodiments wherein the bodily fluid is selected from amniotic fluid, aqueous humour, vitreous humour, bile, blood serum, breast milk, cerebrospinal fluid, cerumen (earwax), chyle, chyme, endolymph, perilymph, exudates, feces, female ejaculate, gastric acid, gastric juice, lymph, mucus (including nasal drainage and phlegm), pericardial fluid, peritoneal fluid, pleural fluid, pus, rheum, saliva, sebum (skin oil), semen, sputum, synovial fluid, sweat, tears, urine, vaginal secretion, vomit and mixtures of one or more thereof. Biological samples include cell cultures, bodily fluids, cell cultures from bodily fluids. Bodily fluids may be obtained from a mammal organism, for example by puncture, or other collecting or sampling procedures.

[0130] The terms “subject,” “individual,” and “patient” are used interchangeably herein to refer to a vertebrate, preferably a mammal, more preferably a human. Mammals include, but are not limited to, murines, simians, humans, farm animals, sport animals, and pets. Tissues, cells and their progeny of a biological entity obtained in vivo or cultured in vitro are also encompassed.

[0131] Various embodiments are described hereinafter. It should be noted that the specific embodiments are not intended as an exhaustive description or as a limitation to the broader embodiments discussed herein. One embodiment described in conjunction with a particular embodiment is not necessarily limited to that embodiment and can be practiced with any other embodiment(s). Reference throughout this specification to “one embodiment”, “an embodiment,” “an example embodiment,” means that a particular feature, structure or characteristic described in connection with the embodiment is included in at least one embodiment of the present invention. Thus, appearances of the phrases “in one embodiment,” “in an embodiment,” or “an example embodiment” in various places throughout this specification are not necessarily all referring to the same embodiment, but may. Furthermore, the particular features, structures or characteristics may be combined in any suitable manner, as would be apparent to a person skilled in the art from this disclosure, in one or more embodiments. Furthermore, while some embodiments described herein include some, but not other features included in other embodiments, combinations of features of different embodiments are meant to be within the scope of the invention. For example, in the appended claims, any of the claimed embodiments can be used in any combination.

[0132] All publications, published patent documents, and patent applications cited herein are hereby incorporated by reference to the same extent as though each individual publication, published patent document, or patent application was specifically and individually indicated as being incorporated by reference.

### Overview

[0133] Embodiments disclosed herein provide engineered adeno-associated virus (AAV) capsids that can be engineered to confer cell-specific and/or species-specific tropism to an engineered AAV particle.

[0134] Embodiments disclosed herein also provide methods of generating the rAAVs having engineered capsids that can involve systematically directing the generation of diverse libraries of variants of modified surface structures, such as variant capsid proteins. Embodiments of the method of generating rAAVs having engineered capsids can also include stringent selection of capsid variants capable of targeting a specific cell, tissue, and/or organ type. Embodiments of the method of generating rAAVs having engineered capsids can include stringent selection of capsid variants capable of efficient and/or homogenous transduction in at least two or more species.

[0135] Embodiments disclosed herein provide vectors and systems thereof capable of producing an engineered AAV described herein.

[0136] Embodiments disclosed herein provide cells that can be capable of producing the engineered AAV particles described herein. In some embodiments, the cells include one or more vectors or system thereof described herein.

[0137] Embodiments disclosed herein provide engineered AAVs that can include an engineered capsid described herein. In some embodiments, the engineered AAV can include a cargo polynucleotide to be delivered to a cell. In some embodiments, the cargo polynucleotide is a gene modification polynucleotide.

[0138] Embodiments disclosed herein provide formulations that can contain an engineered AAV vector or system thereof, an engineered AAV capsid, engineered AAV particles including an engineered AAV capsid described herein, and/or an engineered cell described herein that contains an engineered AAV capsid, and/or an engineered AAV vector or system thereof. In some embodiments, the formulation can also include a pharmaceutically acceptable carrier. The formulations described herein can be delivered to a subject in need thereof or a cell.

[0139] Embodiments disclosed herein also provide kits that contain one or more of the one or more of the polypeptides, polynucleotides, vectors, engineered AAV capsids, engineered AAV particles, cells, or other components described herein and combinations thereof and pharmaceutical formulations described herein. In embodiments, one or more of the polypeptides, polynucleotides, vectors, engineered AAV capsids, engineered AAV particles cells, and combinations thereof described herein can be presented as a combination kit

[0140] Embodiments disclosed herein provide methods of using the engineered AAVs having a cell-specific tropism described herein to deliver, for example, a therapeutic polynucleotide to a cell. In this way, the engineered AAVs described herein can be used to treat and/or prevent a disease in a subject in need thereof. Embodiments disclosed herein also provide methods of delivering the engineered AAV capsids, engineered AAV virus particles, engineered AAV vectors or systems thereof and/or formulations thereof to a cell. Also provided herein are methods of treating a subject in need thereof by delivering an engineered AAV particle, engineered AAV capsid, engineered AAV capsid vector or system thereof, an engineered cell, and/or formulation thereof to the subject.

[0141] Additional features and advantages of the embodiments engineered AAVs and methods of making and using the engineered AAVs are further described herein.

### Engineered AAV Capsids and Encoding Polynucleotides

[0142] Described herein are various embodiments of engineered adeno-associated virus (AAV) capsids that can be engineered to confer cell-specific tropism to an engineered AAV particle. The engineered capsids can be included in an engineered virus particle, and can confer cell-specific tropism, reduced immunogenicity, or both to the engineered AAV particle. The engineered AAV capsids described herein can include one or more engineered AAV capsid proteins described herein.

[0143] The engineered AAV capsid and/or capsid proteins can be encoded by one or more engineered AAV capsid polynucleotides. In some embodiments, an engineered AAV capsid polynucleotide can include a 3′ polyadenylation signal. The polyadenylation signal can be an SV40 polyadenylation signal.

[0144] The engineered AAV capsids can be variants of wild-type AAV capsids. In some embodiments, the wild-type AAV capsids can be composed of VP1, VP2, VP3 capsid proteins or a combination thereof. In other words, the engineered AAV capsids can include one or more variants of a wild-type VP1, wild-type VP2, and/or wild-type VP3 capsid proteins. In some embodiments, the serotype of the reference wild-type AAV capsid can be AAV-1, AAV-2, AAV-3, AAV-4, AAV-5, AAV-6, AAV-8, AAV-9 or any combination thereof. In some embodiments, the serotype of the wild-type AAV capsid can be AAV-9. The engineered AAV capsids can have a different tropism than that of the reference wild-type AAV capsid.

[0145] The engineered AAV capsid can contain 1-60 engineered capsid proteins. In some embodiments, the engineered AAV capsids can contain 1, 2, 3, 4, 5, 6, 7, 8, 9, 10, 11, 12, 13, 14, 15, 16, 17, 18, 19, 20, 21, 22, 23, 24, 25, 26, 27, 28, 29, 30, 31, 32, 33, 34, 35, 36, 37, 38, 39, 40, 41, 42, 43, 44, 45, 46, 47, 48, 49, 50, 51, 52, 53, 54, 55, 56, 57, 58, 59, or 60 engineered capsid proteins. In some embodiments, the engineered AAV capsid can contain 0-59 wild-type AAV capsid proteins. In some embodiments, the engineered AAV capsid can contain 0, 1, 2, 3, 4, 5, 6, 7, 8, 9, 10, 11, 12, 13, 14, 15, 16, 17, 18, 19, 20, 21, 22, 23, 24, 25, 26, 27, 28, 29, 30, 31, 32, 33, 34, 35, 36, 37, 38, 39, 40, 41, 42, 43, 44, 45, 46, 47, 48, 49, 50, 51, 52, 53, 54, 55, 56, 57, 58, or 59 wild-type AAV capsid proteins.

[0146] In some embodiments, the engineered AAV capsid protein can have an n-mer amino acid motif, where n can be at least 3 amino acids. In some embodiments, n can be 3, 4, 5, 6, 7, 8, 9, 10, 11, 12, 13, 14, or 15 amino acids. In some embodiments, the engineered AAV capsid can have a 6-mer or 7-mer amino acid motif. In some embodiments, the n-mer amino acid motif can be inserted between two amino acids in the wild-type viral protein (VP) (or capsid protein). In some embodiments, the n-mer motif can be inserted between two amino acids in a variable amino acid region in an AAV capsid protein. The core of each wild-type AAV viral protein contains an eight-stranded beta-barrel motif (betaB to betaI) and an alpha-helix (alphaA) that are conserved in autonomous parovirus capsids (see e.g. DiMattia et al. 2012. J. Virol. 86(12):6947-6958). Structural variable regions (VRs) occur in the surface loops that connect the beta-strands, which cluster to produce local variations in the capsid surface. AAVs have 12 variable regions (also referred to as hypervariable regions) (see e.g. Weitzman and Linden. 2011. “Adeno-Associated Virus Biology.” In Snyder, R. O., Moullier, P. (eds.) Totowa, N.J.: Humana Press). In some embodiments, one or more n-mer motifs can be inserted between two amino acids in one or more of the 12 variable regions in the wild-type AVV capsid proteins. In some embodiments, the one or more n-mer motifs can be each be inserted between two amino acids in VR-I, VR-II, VR-III, VR-IV, VR-V, VR-VI, VR-VII, VR-III, VR-IX, VR-X, VR-XI, VR-XII, or a combination thereof. In some embodiments, the n-mer can be inserted between two amino acids in the VR-III of a capsid protein. In some embodiments, the engineered capsid can have an n-mer inserted between any two contiguous amino acids between amino acids 262 and 269, between any two contiguous amino acids between amino acids 327 and 332, between any two contiguous amino acids between amino acids 382 and 386, between any two contiguous amino acids between amino acids 452 and 460, between any two contiguous amino acids between amino acids 488 and 505, between any two contiguous amino acids between amino acids 545 and 558, between any two contiguous amino acids between amino acids 581 and 593, between any two contiguous amino acids between amino acids 704 and 714 of an AAV9 viral protein. In some embodiments, the engineered capsid can have an n-mer inserted between amino acids 588 and 589 of an AAV9 viral protein. In some embodiments, the engineered capsid can have a 7-mer motif inserted between amino acids 588 and 589 of an AAV9 viral protein. SEQ ID NO: 1 is a reference AAV9 capsid sequence for at least referencing the insertion sites discussed above. It will be appreciated that n-mers can be inserted in analogous positions in AAV viral proteins of other serotypes. In some embodiments as previously discussed, the n-mer(s) can be inserted between any two contiguous amino acids within the AAV viral protein and in some embodiments the insertion is made in a variable region.

AAV9 capsid reference Sequence.
SEQ ID NO: 1
MAADGYLPDWLEDNLSEGIREWWALKPGAPQPKANQQHQDNARGLVLPG
YKYLGPGNGLDKGEPVNAADAAALEHDKAYDQQLKAGDNPYLKYNHADA
EFQERLKEDTSFGGNLGRAVFQAKKRLLEPLGLVEEAAKTAPGKKRPVE
QSPQEPDSSAGIGKSGAQPAKKRLNFGQTGDTESVPDPQPIGEPPAAPS
GVGSLTMASGGGAPVADNNEGADGVGSSSGNWHCDSQWLGDRVITTSTR
TWALPTYNNHLYKQISNSTSGGSSNDNAYFGYSTPWGYFDFNRFHCHFS
PRDWQRLINNNWGFRPKRLNFKLFNIQVKEVTDNNGVKTIANNLTSTVQ
VFTDSDYQLPYVLGSAHEGCLPPFPADVFMIPQYGYLTLNDGSQAVGRS
SFYCLEYFPSQMLRTGNNFQFSYEFENVPFHSSYAHSQSLDRLMNPLID
QYLYYLSKTINGSGQNQQTLKFSVAGPSNMAVQGRNYIPGPSYRQQRVS
TTVTQNNNSEFAWPGASSWALNGRNSLMNPGPAMASHKEGEDRFFPLSG
SLIFGKQGTGRDNVDADKVMITNEEEIKTTNPVATESYGQVATNHQSAQ
AQAQTGWVQNQGILPGMVWQDRDVYLQGPIWAKIPHTDGNFHPSPLMGG
FGMKHPPPQILIKNTPVPADPPTAFNKDKLNSFITQYSTGQVSVEIEWE
LQKENSKRWNPEIQYTSNYYKSNNVEFAVNTEGVYSEPRPIGTRYLTRN
L

[0147] In some embodiments, the n-mer can be an amino acid can be any amino acid motif as shown in Tables 1-3. In some embodiments, insertion of the n-mer in an AAV capsid can result in cell, tissue, organ, specific engineered AAV capsids. In some embodiments, the engineered capsid can have a specificity for bone tissue and/or cells, lung tissue and/or cells, liver tissues and/or cells, bladder tissue and/or cells, kidney tissue and/or cells, cardiac tissue and/or cells, skeletal muscle tissue and/or cells, smooth muscle and/or cells, neuronal tissue and/or cells, intestinal tissue and/or cells, pancreases tissue and/or cells, adrenal gland tissue and/or cells, brain tissue and/or cells, tendon tissues or cells, skin tissues and/or cells, spleen tissue and/or cells, eye tissue and/or cells, blood cells, synovial fluid cells, immune cells (including specificity for particular types of immune cells), and combinations thereof.

[0148] In some embodiments, the n-mer motif can include an “RGD” motif. An “RGD” motif refers to the presence of the amino acids RGD as the first three amino acids of the n-mer motif. Thus, in some embodiments the n-mer can have a sequence of RGD or RGDXₙ, where n can be 3-15 amino acids and X, where each amino acid present can each be independently selected from the others and can be selected from the group of any amino acid. In some embodiments, the n-mer motif can be RGD (3-mer), RGDX₁ (4-mer), RGDX₁X₂ (5-mer) (SEQ ID NO: 2), RGDX₁X₂X₃ (6-mer) (SEQ ID NO: 3), RGDX₁X₂X₃X₄ (7 mer) (SEQ ID NO: 4), RGDX₁X₂X₃X₄X₅ (8 mer) (SEQ ID NO: 5), or RGDX₁X₂X₃X₄X₅X₆ (9-mer) (SEQ ID NO: 6), RGD₁X₂X₃X₄X₅X₆X₇ (10-mer) (SEQ ID NO: 7), RGD₁X₂X₃X₄X₅X₆X₇X₈ (11-mer) (SEQ ID NO: 8), RGDX₁X₂X₃X₄X₅X₆X₇X₈X₉ (12-mer) (SEQ ID NO: 9), RGDX₁X₂X₃X₄X₅X₆X₇X₈X₉X₁₀ (13-mer) (SEQ ID NO: 10), RGDX₁X₂X₃X₄X₅X₆X₇X₈X₉X₁₀X₁₁ (14-mer) (SEQ ID NO: 11), or RGDX₁X₂X₃X₄X₅X₆X₇X₈X₉X₁₀X₁₁X₁₂ (15-mer) (SEQ ID NO: 12), where X₁, X₂, X₃, X₄, X₅, X₆, X₇, X₈, X₉, X₁₀, X₁₁, X₁₂ can each be independently selected and can be any amino acid. In some embodiments, X₁ can be L, T, A, M, V, Q, or M. In some embodiments, X₂ can be T, M, S, N, L, A, or I. In some embodiments, X₃ can be T, E, N, O, S, Q, Y, A, or D. In some embodiments, X₄ can be P, Y, K, L, H, T, or S. In some embodiments, n-mers including the RGD motif can be included in a muscle-specific engineered AAV capsids. In some embodiments, the n-mer motif can be in any one of Tables 4-6. In some embodiments, the n-mer in any of Tables 4-6 can be included in a muscle specific engineered capsid.

TABLE 1
CK8 Results mRNA Second Round of Capsid Variant Selection in C57BL6
mice-score capped at 100

| | | | | | Sum of |
|---|---|---|---|---|---|
| | | | | | muscle |
| | | | | | mRNA |
| Variant | | SEQ ID | Amino Acid | SEQ ID | score_capped |
| ID | Nucleotide Sequence | NO: | Sequence | NO: | at 100 |
| 1 | AGGGGTGATCTTTCTACGCCT | 60 | RGDLSTP | 1277 | 715.366 |
| 2 | AGGGGCGACCTGAACCAATAC | 61 | RGDLNQY | 1278 | 712.149 |
| 3 | CGGGGTGATCTTACTACGCCT | 62 | RGDLTTP | 1279 | 461.536 |
| 4 | AGGGGGGATGCGACGGAGCTT | 63 | RGDATEL | 1280 | 452.77 |
| 5 | CGGGGTGATCAGCTTTATCAT | 64 | RGDQLYH | 1281 | 444.505 |
| 6 | AGAGGCGACTTATCCACACCC | 65 | RGDLSTP | 1282 | 411.692 |
| 7 | CGTGGTGATGTGGCGGCTAAG | 66 | RGDVAAK | 1283 | 371.7 |
| 8 | AGAGGAGACTTGACAACCCCA | 67 | RGDLTTP | 1284 | 361.486 |
| 9 | CGGGGTGATCTTAATCAGTAT | 68 | RGDLNQY | 1285 | 342.712 |
| 10 | CGAGGAGACACCATGAGCAAA | 69 | RGDTMSK | 1286 | 325.632 |
| 11 | CGCGGAGACGTAGCCGCCAAA | 70 | RGDVAAK | 1287 | 315.01 |
| 12 | CGGGGGGATACTATGTCTAAG | 71 | RGDTMSK | 1288 | 309.567 |
| 13 | CGGGGTGACGCAACAGAATTG | 72 | RGDATEL | 1289 | 306.99 |
| 14 | GCACGGTCAAACGACTCGGTC | 73 | ARSNDSV | 1290 | 293.22 |
| 15 | CGGGGTGACATGAACAACTCA | 74 | RGDMNNS | 1291 | 268.677 |
| 16 | ACGATGGGTGCTAATGGTACT | 75 | TMGANGT | 1292 | 260.853 |
| 17 | CCTAATGTTACGCAGTCTTAT | 76 | PNVTQSY | 1293 | 259.718 |
| 18 | CGTTTGGACCTGCAAGTCCAC | 77 | RLDLQVH | 1294 | 257.65 |
| 19 | GGGCTTTCTAAGGCGTCTGAT | 78 | GLSKASD | 1295 | 255.938 |
| 20 | GATCCTGGTCGGACGGGTACG | 79 | DPGRTGT | 1296 | 253.325 |
| 21 | TATCGGGGTAGGGAGGATTGG | 80 | YRGREDW | 1297 | 244.83 |
| 22 | AGATACGGAGAATCCATCGAA | 81 | RYGESIE | 1298 | 231.696 |
| 23 | AGTCTGAACAACATGGGATCG | 82 | SLNNMGS | 1299 | 229.6044 |
| 24 | AATAGTGATCAGCGGAATTGG | 83 | NSDQRNW | 1300 | 229.031 |
| 25 | CGTGGTGATATGTCTCGTGAG | 84 | RGDMSRE | 1301 | 227.081 |
| 26 | ATGACTGATGCGAATAGGATT | 85 | MTDANRI | 1302 | 226.194 |
| 27 | GTCTACAACGGCAACGTAGTA | 86 | VYNGNVV | 1303 | 223.663 |
| 28 | CGTGGGGATATGATTAATACG | 87 | RGDMINT | 1304 | 223.46 |
| 29 | AGTGGTCTTTCGCATGGTCAG | 88 | SGLSHGQ | 1305 | 221.726 |
| 30 | ACTGGCCAATTAGTAGGAACC | 89 | TGQLVGT | 1306 | 221.181 |
| 31 | GCTAATTCTATTGGGGGTCCG | 90 | ANSIGGP | 1307 | 220.304 |
| 32 | TACAGTCAATCGCTGTCTGAA | 91 | YSQSLSE | 1308 | 220.02 |
| 33 | TATCATAAGTATAGTACGGAT | 92 | YHKYSTD | 1309 | 217.64 |
| 34 | GCTCGTCATGATGAGCATGTG | 93 | ARHDEHV | 1310 | 217 |
| 35 | GCCATAGACTCTATCAAACAA | 94 | AIDSIKQ | 1311 | 216.071 |
| 36 | CGTTTGGACCTGCAAGTCAAC | 95 | RLDLQVN | 1312 | 215 |
| 37 | CGCGGCGACATGATAAACACC | 96 | RGDMINT | 1313 | 214.271 |
| 38 | AGTGTGTTGTCTCAGGCTAAT | 97 | SVLSQAN | 1314 | 213.907 |
| 39 | TTTACGGTGAATCAGGATCTT | 98 | FTVNQDL | 1315 | 213.78 |
| 40 | ACGGATAATGGTCTTCTTGTG | 99 | TDNGLLV | 1316 | 211.787 |
| 41 | TATCAGCAGACTTCTAGTACG | 100 | YQQTSST | 1317 | 211.386 |
| 42 | ACAGAACAATCTTACTCACGA | 101 | TEQSYSR | 1318 | 210.762 |
| 43 | ATTATGGGGCTTAGTCAGGCT | 102 | IMGLSQA | 1319 | 208.157 |
| 44 | GCTACTGCGCATCAGGATGGT | 103 | ATAHQDG | 1320 | 207.212 |
| 45 | TATAATGCTACTCCTTCGCAG | 104 | YNATPSQ | 1321 | 206.964 |
| 46 | TATACGCAGGGTATTATGAAT | 105 | YTQGIMN | 1322 | 206.672 |
| 47 | GAATCCCTCCCAATCTCTAAA | 106 | ESLPISK | 1323 | 206.576 |
| 48 | GGCACCGTCGTTCCGGGCTCC | 107 | GTVVPGS | 1324 | 206.111 |
| 49 | GGATTAGCTAGTCTACACCTG | 108 | GLASLHL | 1325 | 204.394 |
| 50 | TATATTGCTGCGGGTGAGCAG | 109 | YIAAGEQ | 1326 | 204.24 |
| 51 | AACACCTACCCCTTCAACGCC | 110 | NTYPFNA | 1327 | 203.931 |
| 52 | GTTGGTGCGAGTACGGCTTCG | 111 | VGASTAS | 1328 | 202.92 |
| 53 | GGATCCAACTACTTAGCAAAC | 112 | GSNYLAN | 1329 | 202.857 |
| 54 | GATACTGGTCGGACGGGTACG | 113 | DTGRTGT | 1330 | 202.83 |
| 55 | AAGCCGAATACGATGAGTGAT | 114 | KPNTMSD | 1331 | 202.7282 |
| 56 | GTAGACAAATCTAGCCCAGTG | 115 | VDKSSPV | 1332 | 201.849 |
| 57 | AGTTCGGACCCAAAAGGTCAA | 116 | SSDPKGQ | 1333 | 201.825 |
| 58 | TGGCAGACGAATGGTATGCAG | 117 | WQTNGMQ | 1334 | 201.6943 |
| 59 | ACCGGTAGCTTGAACTCTATG | 118 | TGSLNSM | 1335 | 201.671 |
| 60 | CATTCTAATTCGAGTCAGAAT | 119 | HSNSSQN | 1336 | 200.954 |
| 61 | GGCCGTGACGACCTCACAAAC | 120 | GRDDLTN | 1337 | 200.911 |
| 62 | GATACTTATAAGGGTAAGTGG | 121 | DTYKGKW | 1338 | 200.7787 |
| 63 | TATACGGCGCAGACCGGCTGG | 122 | YTAQTGW | 1339 | 200 |
| 64 | AATCAGGTGGGTGCGTCTGCG | 123 | NQVGASA | 1340 | 200 |
| 65 | ATCGACGTACTGAACGGAAGT | 124 | IDVLNGS | 1341 | 200 |
| 66 | TTTCGGACGGTGTATACTGGT | 125 | FRTVYTG | 1342 | 200 |
| 67 | GGAAACATGGTGACTCCAAAC | 126 | GNMVTPN | 1343 | 200 |
| 68 | GATACTTATAACGGTAAGTGG | 127 | DTYNGKW | 1344 | 200 |
| 69 | ACCATCCAAGACCACATAAAA | 128 | TIQDHIK | 1345 | 200 |
| 70 | GGAGCAAAAGGAACCATGGGC | 129 | GAKGTMG | 1346 | 200 |
| 71 | ACGAGGAGCAACTCCGACGAA | 130 | TRSNSDE | 1347 | 200 |
| 72 | GCTACTACTCTTACTGGTGAT | 131 | ATTLTGD | 1348 | 200 |
| 73 | TCATACGGAGGATCTGGCCCC | 132 | SYGGSGP | 1349 | 198.715 |
| 74 | GAAAAATCCGTCGAATCCAAA | 133 | EKSVESK | 1350 | 196.418 |
| 75 | CGAGGCGACACAATGAACTAC | 134 | RGDTMNY | 1351 | 195.3082 |
| 76 | CGGGATCTGGGGCAGACCGGC | 135 | RDLGQTG | 1352 | 194.34 |
| 77 | AGTCCGCAGCTGAGTGTGATG | 136 | SPQLSVM | 1353 | 194.21 |
| 78 | CGAGGAGACAACAGCACACCG | 137 | RGDNSTP | 1354 | 193.05 |
| 79 | CCTATGGCAGGACACCCCCCG | 138 | PMAGHPP | 1355 | 192.726 |
| 80 | ACGGCGTATCAGGCTGGTCTG | 139 | TAYQAGL | 1356 | 191.778 |
| 81 | GTGGTAAACCAAGGAAACCAA | 140 | VVNQGNQ | 1357 | 191.737 |
| 82 | GATAAGACTGAGATGCTGCAG | 141 | DKTEMLQ | 1358 | 191.13 |
| 83 | ACTGTGATGATGAGTACGAGG | 142 | TVMMSTR | 1359 | 191.063 |
| 84 | CAGCAGAATACGCGTTTGCCG | 143 | QQNTRLP | 1360 | 190.1825 |
| 85 | TACCAACACAACCAAGCCCAC | 144 | YQHNQAH | 1361 | 189.595 |
| 86 | AATCAGAGTATTAATAATATT | 145 | NQSINNI | 1362 | 188.654 |
| 87 | CGAGGAGACCACAGCACACCG | 146 | RGDHSTP | 1363 | 187.365 |
| 88 | GACTCTACACTTCACTTAAGT | 147 | DSTLHLS | 1364 | 187.36 |
| 89 | GCGAACATAGAAAACACGTCA | 148 | ANIENTS | 1365 | 187.03 |
| 90 | ACAAACGCTGCTCTAGTACCA | 149 | TNAALVP | 1366 | 185.9743 |
| 91 | GGGCAGAAGGAGACTACTGCG | 150 | GQKETTA | 1367 | 184.457 |
| 92 | GAACTTAACACCGCACACGCA | 151 | ELNTAHA | 1368 | 184.059 |
| 93 | GGTGTTAGTAGTAATTCTGCG | 152 | GVSSNSA | 1369 | 183.964 |
| 94 | AGCACAAACGCGGGACAAAGG | 153 | STNAGQR | 1370 | 183.571 |
| 95 | GAACAACAAAAAACAGACAAC | 154 | EQQKTDN | 1371 | 182.331 |
| 96 | GCTGTTGTGAATGAGAATATG | 155 | AVVNENM | 1372 | 182.3 |
| 97 | GGCAGCGTCAGCACCAGCGCA | 156 | GSVSTSA | 1373 | 181.451 |
| 98 | GAGTTGGGTAGTCAGCGTATG | 157 | ELGSQRM | 1374 | 181.36 |
| 99 | AGAGGCGACTTATCCACACAC | 158 | RGDLSTH | 1375 | 181.15 |
| 100 | GACCACCAACAAGCCCTAGCT | 159 | DHQQALA | 1376 | 180.295 |
| 101 | AACAGATCTGACGCTCACGAA | 160 | NRSDAHE | 1377 | 180.265 |
| 102 | AATGTTAATGCGCAGAGTAGG | 161 | NVNAQSR | 1378 | 179.918 |
| 103 | ACCCAAGGGAACAACATGGTA | 162 | TQGNNMV | 1379 | 179.575 |
| 104 | ACGGCGCTGAATACGTATCCT | 163 | TALNTYP | 1380 | 179.568 |
| 105 | GTCTCTACATACCTCCTGGCA | 164 | VSTYLLA | 1381 | 179.172 |
| 106 | GGCGGCAACTACAACACAACT | 165 | GGNYNTT | 1382 | 178.62 |
| 107 | AGTAATATTAAGCCGGAGATT | 166 | SNIKPEI | 1383 | 178.567 |
| 108 | CCGAGGGTGCATGGTCAGGTT | 167 | PRVHGQV | 1384 | 178.479 |
| 109 | TCTAATTCTAATACTGCTGCT | 168 | SNSNTAA | 1385 | 178.119 |
| 110 | CTTGAGGTGGCGACGAGTCCG | 169 | LEVATSP | 1386 | 177.75 |
| 111 | CACGACGCCGACAAATTAGCT | 170 | HDADKLA | 1387 | 177.05 |
| 112 | GGTGTGTATATTGATGGTCGG | 171 | GVYIDGR | 1388 | 176.229 |
| 113 | TCGATGCAGTCGTATACGATG | 172 | SMQSYTM | 1389 | 175.538 |
| 114 | TCTAAAGGAAACGAACAAATG | 173 | SKGNEQM | 1390 | 175.311 |
| 115 | GGTCGGGATTATGCTATGAGT | 174 | GRDYAMS | 1391 | 174.17 |
| 116 | ACTGATGGTATTTTTCAGCCT | 175 | TDGIFQP | 1392 | 174.014 |
| 117 | GGGAGCCCAGTGATAGTAAAC | 176 | GSPVIVN | 1393 | 173.652 |
| 118 | ACATTAACAGACGTTCACCGA | 177 | TLTDVHR | 1394 | 172.837 |
| 119 | AAAAGCGAAGTACCCGCCCGA | 178 | KSEVPAR | 1395 | 172.72 |
| 120 | GTCAACACTGGCGCACTCTTG | 179 | VNTGALL | 1396 | 172.648 |
| 121 | AGTCAGCAGGGTTTTACTCTG | 180 | SQQGFTL | 1397 | 172.124 |
| 122 | AATAATAAGTCTGTGCCGGAT | 181 | NNKSVPD | 1398 | 172.0753 |
| 123 | AGTGTGATGGTGGGTACGAAT | 182 | SVMVGTN | 1399 | 171.86 |
| 124 | CGAAACGAAAACACTTACAAC | 183 | RNENTYN | 1400 | 170.674 |
| 125 | CAAGCTAACTTATCAATAATC | 184 | QANLSII | 1401 | 170.5862 |
| 126 | CCCGGACGGGACAGCAGAACG | 185 | PGRDSRT | 1402 | 169.875 |
| 127 | TTTCCGGCTAATGGTGGTGCT | 186 | FPANGGA | 1403 | 169.639 |
| 128 | GCTGGTAAGGATCTTAGTAAT | 187 | AGKDLSN | 1404 | 169.592 |
| 129 | GCACAATTCGAATCAGGCCGA | 188 | AQFESGR | 1405 | 169.281 |
| 130 | GGATACGGCAGTTACAGCAAC | 189 | GYGSYSN | 1406 | 169.247 |
| 131 | ACAATCGTTTCCGCTTACGCC | 190 | TIVSAYA | 1407 | 168.87 |
| 132 | AATGTGAGTCCTAATTTGACT | 191 | NVSPNLT | 1408 | 168.739 |
| 133 | AGAGGCGACTTATCAACACCC | 192 | RGDLSTP | 1409 | 167.66 |
| 134 | TTCTTAGAAGGAGTCGCTCAA | 193 | FLEGVAQ | 1410 | 167.647 |
| 135 | GGCTCCGAACGAGGAGAACGA | 194 | GSERGER | 1411 | 167.585 |
| 136 | TTGAATGTTGGTTCGAGTCTT | 195 | LNVGSSL | 1412 | 167.104 |
| 137 | CGTATTGTGGCTAATGAGCAG | 196 | RIVANEQ | 1413 | 166.96 |
| 138 | CAATCTATCGGCCACCCCGTT | 197 | QSIGHPV | 1414 | 166.7759 |
| 139 | GGTGGTATGTCGGCGCATTCG | 198 | GGMSAHS | 1415 | 166.775 |
| 140 | CATTCTACGACGTCTATGACG | 199 | HSTTSMT | 1416 | 166.711 |
| 141 | ACTGTAAACGGTACGAACGTA | 200 | TVNGTNV | 1417 | 166.64 |
| 142 | CTTGCGCCTGATAATATTGGG | 201 | LAPDNIG | 1418 | 166.005 |
| 143 | CAAACAGCGACTCTCGTGGCA | 202 | QTATLVA | 1419 | 165.921 |
| 144 | GCATCAGCACCGTCTGAATTC | 203 | ASAPSEF | 1420 | 165.64 |
| 145 | TCGATGGAGGGTCAGCAGCAT | 204 | SMEGQQH | 1421 | 165.62 |
| 146 | CAAGACGTAGGACGCACGAAC | 205 | QDVGRTN | 1422 | 164.147 |
| 147 | GTCTACAACGGCAACGAAGTA | 206 | VYNGNEV | 1423 | 164.11 |
| 148 | GCACAGGCGCAGACAGGCTGG | 207 | AQAQTGW | 1424 | 163.93 |
| 149 | CGGCTGGATCTGACGCATACG | 208 | RLDLTHT | 1425 | 163.75 |
| 150 | GCTGCACACGGCCGCGAACAA | 209 | AAHGREQ | 1426 | 163.577 |
| 151 | AGAGGCGACTTATACACACCC | 210 | RGDLYTP | 1427 | 163.43 |
| 152 | GGTATGCAGCAGAGGGAGAAG | 211 | GMQQREK | 1428 | 163.075 |
| 153 | CAGACTCAGGCGAGTACTAAT | 212 | QTQASTN | 1429 | 161.336 |
| 154 | CGGGACACCAACGCCCTCGGA | 213 | RDTNALG | 1430 | 161.225 |
| 155 | TCGAGTCAGATTTCTAATAGT | 214 | SSQISNS | 1431 | 161.063 |
| 156 | CAGTCGGTTAATAGTACGAGT | 215 | QSVNSTS | 1432 | 160.873 |
| 157 | GCTCTGGAGAGGGCTCAGTAT | 216 | ALERAQY | 1433 | 160.837 |
| 158 | CATACTGGGCATAGTTCTGTG | 217 | HTGHSSV | 1434 | 160.068 |
| 159 | CGGGGAGACATGACCCGAGCA | 218 | RGDMTRA | 1435 | 159.605 |
| 160 | TTTCAGCGTGATCTTGGGCAT | 219 | FQRDLGH | 1436 | 159.442 |
| 161 | ACAACCGGCGACATAATACGC | 220 | TTGDIIR | 1437 | 159.11 |
| 162 | TCTTTTCAGACGGATCGTGCG | 221 | SFQTDRA | 1438 | 159.04 |
| 163 | CAATCCAGCGACGGCCGAGTG | 222 | QSSDGRV | 1439 | 158.634 |
| 164 | ACTTCTGGGGCTTTGACCCGG | 223 | TSGALTR | 1440 | 158.32 |
| 165 | AATTCGAATACTGTGAATACG | 224 | NSNTVNT | 1441 | 157.71 |
| 166 | ATCTCCGGTAGTAGCAGTCTA | 225 | ISGSSSL | 1442 | 157.64 |
| 167 | AACGACAAATCAACCAACGTA | 226 | NDKSTNV | 1443 | 157.594 |
| 168 | ATCGTACTTGCTCCCACATCG | 227 | IVLAPTS | 1444 | 157.48 |
| 169 | TCAGGCGTCAACTACGGTGTC | 228 | SGVNYGV | 1445 | 157.321 |
| 170 | GTCGGCGCCCAACGGGACCCC | 229 | VGAQRDP | 1446 | 157.055 |
| 171 | ACGGGTATGAATAGTAATAAG | 230 | TGMNSNK | 1447 | 156.85 |
| 172 | ATCGAAGCCTACTCACGAGAC | 231 | IEAYSRD | 1448 | 156.774 |
| 173 | TTACACACAACACTAATGCCC | 232 | LHTTLMF | 1449 | 156.364 |
| 174 | TCTGATAATCATCTGAAGACT | 233 | SDNHLKT | 1450 | 156.334 |
| 175 | CGAAACGAAGACAAAGGAGGA | 234 | RNEDKGG | 1451 | 156.027 |
| 176 | ACGAAGGGTGCTAATGGTACT | 235 | TKGANGT | 1452 | 155.56 |
| 177 | GTCTACAACGGCAACGTAGAA | 236 | VYNGNVE | 1453 | 155.56 |
| 178 | TCAAACAGCGGAGGCAACCAC | 237 | SNSGGNH | 1454 | 155.294 |
| 179 | GTAGCCGCGGGACCAGAAGCG | 238 | VAAGPEA | 1455 | 154.25 |
| 180 | ACGTCTCTTAGTGGTAGTGCG | 239 | TSLSGSA | 1456 | 153.988 |
| 181 | GTTGGGCTGCAGAGTAATACT | 240 | VGLQSNT | 1457 | 153.453 |
| 182 | CACACCGCCCACAGCGTGGAC | 241 | HTAHSVD | 1458 | 153.3866 |
| 183 | AACGTGGGAATGAGCTCAACC | 242 | NVGMSST | 1459 | 153.212 |
| 184 | CATGCGGATGTGAATGCTGGG | 243 | HADVNAG | 1460 | 153.21 |
| 185 | AAAGCGGGACAACTAGTGGAA | 244 | KAGQLVE | 1461 | 153.178 |
| 186 | AGTACTTTTAGTGTGCTGCCT | 245 | STFSVLP | 1462 | 153.09 |
| 187 | CCTCAGTCTCCGAGTCGGGTT | 246 | PQSPSRV | 1463 | 152.823 |
| 188 | CACACCGCCACCCTTAGCAGC | 247 | HTATLSS | 1464 | 152.8 |
| 189 | CTTCCGCGTCATGATCAGTAT | 248 | LPRHDQY | 1465 | 152.412 |
| 190 | CAAGTGAACAACCCACTCACA | 249 | QVNNPLT | 1466 | 151.574 |
| 191 | ACAACAGAAACCGCACGAGGT | 250 | TTETARG | 1467 | 151.4255 |
| 192 | GTTCATGGGACGTTGACTTAT | 251 | VHGTLTY | 1468 | 150.654 |
| 193 | TATAGTACTGATCTTAGGATG | 252 | YSTDLRM | 1469 | 150.626 |
| 194 | GCACACGCTACCTCAAGCACT | 253 | AHATSST | 1470 | 150.587 |
| 195 | AGGGAGAGTGCTGCTCTGGCG | 254 | RESAALA | 1471 | 150.506 |
| 196 | AAGGATACTAATCAGCAGATT | 255 | KDTNQQI | 1472 | 150.189 |
| 197 | AGTATGCAATCATACACCATG | 256 | SMQSYTM | 1473 | 148.994 |
| 198 | ACAGCCTACTCGCCCACAGTC | 257 | TAYSPTV | 1474 | 148.946 |
| 199 | GAATCTGCCCACCAAAGAATA | 258 | ESAHQRI | 1475 | 148.867 |
| 200 | AGATACACAACAGCACAACAA | 259 | RYTTAQQ | 1476 | 148.802 |
| 201 | ACGTCTGTGGCGAATGTGAGT | 260 | TSVANVS | 1477 | 148.731 |
| 202 | AGGGATCAGCATACTTCTATT | 261 | RDQHTSI | 1478 | 148.687 |
| 203 | TCTGTTACGTCTTCTGGTCCG | 262 | SVTSSGP | 1479 | 148.574 |
| 204 | GCGGTTGTTCTGAATAGTAAT | 263 | AVVLNSN | 1480 | 148.476 |
| 205 | CCTGGGAATCCGTCTAGTAAT | 264 | PGNPSSN | 1481 | 147.792 |
| 206 | ACGGGGTCTACTACTCAGCTT | 265 | TGSTTQL | 1482 | 147.767 |
| 207 | GCTAATGAGCATAATGTGGGT | 266 | ANEHNVG | 1483 | 147.569 |
| 208 | ATGCAAAGAGAAGCAGCCAAC | 267 | MQREAAN | 1484 | 147.562 |
| 209 | TTAACCGACACAAACACCCGG | 268 | LTDTNTR | 1485 | 147.306 |
| 210 | CGAATGACCGAAATATCATAC | 269 | RMTEISY | 1486 | 146.933 |
| 211 | AAAGTGGACATGACCTCCAAA | 270 | KVDMTSK | 1487 | 146.392 |
| 212 | AGAGGAGACTTATCCACACCC | 271 | RGDLSTP | 1488 | 146.3 |
| 213 | CAAGCAAAAGCTAGCACAACT | 272 | QAKASTT | 1489 | 146.214 |
| 214 | CTACCCTCAACAGAAACTTTG | 273 | LPSTETL | 1490 | 145.892 |
| 215 | AGTAGTGCGCTTAATGCGTAT | 274 | SSALNAY | 1491 | 145.667 |
| 216 | TCGTCTGATCCTAAGGGGCAG | 275 | SSDPKGQ | 1492 | 145.644 |
| 217 | TTAGACGTGACGAGAATGAGA | 276 | LDVTRMR | 1493 | 145.51 |
| 218 | GCGGATGGTGGTGATAAGGGG | 277 | ADGGDKG | 1494 | 145.45 |
| 219 | ATGCTGTCTCAGGTTACGTTG | 278 | MLSQVTL | 1495 | 145.32 |
| 220 | AGTGTTAGTTCTGTGGTGTTG | 279 | SVSSVVL | 1496 | 145.202 |
| 221 | ACCGAATCGCAAACCATGAGG | 280 | TESQTMR | 1497 | 145.0149 |
| 222 | TTCGGATCCCAAGAAAAACTC | 281 | FGSQEKL | 1498 | 144.467 |
| 223 | ACAGCCGGCGGCGAACGCGCC | 282 | TAGGERA | 1499 | 144.445 |
| 224 | GATCATAGTAAGCAGAGTTCG | 283 | DHSKQSS | 1500 | 144.0179 |
| 225 | ATTGATAGTACTTGGAATACG | 284 | IDSTWNT | 1501 | 143.92 |
| 226 | TCGCCTCGCCCCGAACTCCGA | 285 | SPRPELR | 1502 | 143.362 |
| 227 | AGTATTGCGACTGCTACTAGT | 286 | SIATATS | 1503 | 143.312 |
| 228 | GTAATAGGCGGACACGGGACT | 287 | VIGGHGT | 1504 | 143.136 |
| 229 | AGCACCGCCATGTACCCCCAC | 288 | STAMYPH | 1505 | 142.798 |
| 230 | CGGGACTTGAGACCCGTGACG | 289 | RDLRPVT | 1506 | 142.461 |
| 231 | GCTCATCTGACTGATCTTCCG | 290 | AHLTDLP | 1507 | 142.37 |
| 232 | TTTCTGAATAGTACGCAGCTT | 291 | FLNSTQL | 1508 | 142.276 |
| 233 | TTAAACAACAGTGCCACAGTC | 292 | LNNSATV | 1509 | 142.021 |
| 234 | GATCGTCCGAATAATATGACG | 293 | DRPNNMT | 1510 | 141.945 |
| 235 | TCATCGTCAGACTCACCCAGA | 294 | SSSDSPR | 1511 | 141.849 |
| 236 | CGCTTGGACGTTGGAAGCCCG | 295 | RLDVGSP | 1512 | 141.82 |
| 237 | GCGCAGCAGAGTCTTCATGGT | 296 | AQQSLHG | 1513 | 141.401 |
| 238 | ATGGGGAAGCATGAGGGTCTT | 297 | MGKHEGL | 1514 | 141.2916 |
| 239 | GAGAATGCTCGTGAGGGTGTG | 298 | ENAREGV | 1515 | 140.87 |
| 240 | ACCGTATCTCTCTCGGAAGGC | 299 | TVSLSEG | 1516 | 140.529 |
| 241 | CTTAACACACTAATCGACCGG | 300 | LNTLIDR | 1517 | 140.256 |
| 242 | GAACTCTCCGTTCCGAAACCA | 301 | ELSVPKP | 1518 | 140.203 |
| 243 | AAAGACAAAAACGTATACATA | 302 | KDKNVYI | 1519 | 140.171 |
| 244 | AATGCGAATGGGCCTGTGAGT | 303 | NANGPVS | 1520 | 140.158 |
| 245 | CTTACTACGAATGGTATGCTG | 304 | LTTNGML | 1521 | 140.147 |
| 246 | GCCGGCGAATCTTCACCCACA | 305 | AGESSPT | 1522 | 139.95 |
| 247 | AGTGGGATTGGTACTTATTCT | 306 | SGIGTYS | 1523 | 139.76 |
| 248 | GTCAGATCTATGGACGAATTG | 307 | VRSMDEL | 1524 | 139.74 |
| 249 | ATGAACACCGGCTCTTCGAGT | 308 | MNTGSSS | 1525 | 139.328 |
| 250 | GGGGTGACTGTTAGGGAGCTT | 309 | GVTVREL | 1526 | 139.099 |
| 251 | CAGATTTTGAATTATAGTGTG | 310 | QILNYSV | 1527 | 138.991 |
| 252 | ATGGCGGGTGAGTATAGGGTT | 311 | MAGEYRV | 1528 | 138.933 |
| 253 | TGGTCGCATGATCGGCCTACT | 312 | WSHDRPT | 1529 | 138.703 |
| 254 | TGCAAAAACAACTCAGAATGC | 313 | CKNNSEC | 1530 | 138.668 |
| 255 | TTGACGACGAATAGTCATTAT | 314 | LTTNSHY | 1531 | 138.525 |
| 256 | ATGCTTGTTCAGAATACTCCT | 315 | MLVQNTP | 1532 | 138.3 |
| 257 | CGTGGTGCGACTGAGCATGCG | 316 | RGATEHA | 1533 | 138.186 |
| 258 | GCTTCGAATGGGAGTATGGGT | 317 | ASNGSMG | 1534 | 138.1181 |
| 259 | AATAGTTATACTGCTGGGAAG | 318 | NSYTAGK | 1535 | 137.4033 |
| 260 | TCCACCCAAGGAGCCATCCTC | 319 | STQGAIL | 1536 | 137.294 |
| 261 | TGGAATACGAATATGGCGATT | 320 | WNTNMAI | 1537 | 137.17 |
| 262 | GTCTCATCGTACGAAAAAATA | 321 | VSSYEKI | 1538 | 137.055 |
| 263 | GTGCTGAGTACGGGGCAGCGG | 322 | VLSTGQR | 1539 | 136.9001 |
| 264 | CCTATACCCCACGGTTCATCC | 323 | PIPHGSS | 1540 | 136.523 |
| 265 | AACGTGTCACTAACGCAAACG | 324 | NVSLTQT | 1541 | 136.4003 |
| 266 | TCTACCATCGGCAACAGCACG | 325 | STIGNST | 1542 | 136.393 |
| 267 | TCTGAGAAGCTGACTGATAAG | 326 | SEKLTDK | 1543 | 136.36 |
| 268 | TCCAAAGACTCGAACATAAGT | 327 | SKDSNIS | 1544 | 136.166 |
| 269 | GCGAATAGTAATCATGAGCGT | 328 | ANSNHER | 1545 | 136.102 |
| 270 | AGGGATACGGGTGATAAGGCT | 329 | RDTGDKA | 1546 | 135.913 |
| 271 | AGAACAGACACGCCGTCAACC | 330 | RTDTPST | 1547 | 135.583 |
| 272 | CCTACTATGTCGAGTCTGAAT | 331 | PTMSSLN | 1548 | 135.539 |
| 273 | GATATTACTAATCAGTCGTAT | 332 | DITNQSY | 1549 | 135.473 |
| 274 | CTTGTAAAACCGGAAACTTGG | 333 | LVKPETW | 1550 | 134.988 |
| 275 | GGGACTTCCTTGGAAAACCGA | 334 | GTSLENR | 1551 | 134.981 |
| 276 | GCTGCTGGTAATCCTACTCGT | 335 | AAGNPTR | 1552 | 134.779 |
| 277 | CACAACGTCGGCCTAGGACAC | 336 | HNVGLGH | 1553 | 134.677 |
| 278 | GTATCAACGACAACGGACCGG | 337 | VSTTTDR | 1554 | 134.639 |
| 279 | TATTTGTCGTCTGGTAAGATG | 338 | YLSSGKM | 1555 | 134.553 |
| 280 | GATAGTCGGAATGCTGCTTTG | 339 | DSRNAAL | 1556 | 134.213 |
| 281 | GTGGAGCGGAATACTGATATG | 340 | VERNTDM | 1557 | 133.962 |
| 282 | ACTGTTGGGAGTAATTCTATT | 341 | TVGSNSI | 1558 | 133.95 |
| 283 | GTGCGGTCTGGTAATAAGCCG | 342 | VRSGNKP | 1559 | 133.87 |
| 284 | GGCAGTTCGGGGAACAGCGGA | 343 | GSSGNSG | 1560 | 133.776 |
| 285 | TCTACTTCAATAGGAGTGGTA | 344 | STSIGVV | 1561 | 133.69 |
| 286 | CCGAGTCAGAGTAGGTCGCTT | 345 | PSQSRSL | 1562 | 133.6751 |
| 287 | CGGAATGAGAATCTTAATAAT | 346 | RNENLNN | 1563 | 133.26 |
| 288 | TCGTTGGGTAAGAGGGAGGAG | 347 | SLGKREE | 1564 | 133.032 |
| 289 | TCACGCTTGGACTCGAGCTCC | 348 | SRLDSSS | 1565 | 132.783 |
| 290 | GATTCGACGTATGTTTTGGCT | 349 | DSTYVLA | 1566 | 132.54 |
| 291 | GAGCGTAATCCTATTTCTGAT | 350 | ERNPISD | 1567 | 132.49 |
| 292 | GTTAGCTCCGGCCACACGAAA | 351 | VSSGHTK | 1568 | 132.466 |
| 293 | AAGTATACGGAGTCGAATGCG | 352 | KYTESNA | 1569 | 132.305 |
| 294 | AACCGCAACTCAGTTGGGACT | 353 | NRNSVGT | 1570 | 132.2576 |
| 295 | CACGAAAGCCACTACGTGTCA | 354 | HESHYVS | 1571 | 132.014 |
| 296 | ACGACTGGGGGGACGGGGATG | 355 | TTGGTGM | 1572 | 131.954 |
| 297 | GCGACTGATAAGATGACTCCT | 356 | ATDKMTP | 1573 | 131.931 |
| 298 | TCCGCGTCTAGCGGCGCTACA | 357 | SASSGAT | 1574 | 131.886 |
| 299 | TCAACCACTACTGGCCACATG | 358 | STTTGHM | 1575 | 131.581 |
| 300 | ATAATAGCATCCTCTACCACG | 359 | IIASSTT | 1576 | 131.506 |
| 301 | GATACTGGGTCTAGGATTGCG | 360 | DTGSRIA | 1577 | 131.486 |
| 302 | TGGGCTGATGATTCGCAGCGG | 361 | WADDSQR | 1578 | 131.47 |
| 303 | AGGGGTAACACTCTCGAAATG | 362 | RGNTLEM | 1579 | 131.381 |
| 304 | AATCTGCAGGTGAATGCGAAT | 363 | NLQVNAN | 1580 | 131.172 |
| 305 | GCGACGACTCAGCTGATGACT | 364 | ATTQLMT | 1581 | 130.96 |
| 306 | GCTGATACGAATATTATTGTG | 365 | ADTNIIV | 1582 | 130.47 |
| 307 | GCCATAACAATCACTCAAAAA | 366 | AITITQK | 1583 | 130.225 |
| 308 | GACTCCAACAAAGGAGCGACG | 367 | DSNKGAT | 1584 | 130.1749 |
| 309 | GGCAACGCTTCCGGAAACCCA | 368 | GNASGNP | 1585 | 129.97 |
| 310 | ACGATGGGTGCTAAAGGTACT | 369 | TMGAKGT | 1586 | 129.92 |
| 311 | TATCTGCAGACGGGTACTCTG | 370 | YLQTGTL | 1587 | 129.907 |
| 312 | GCATTACACACCAAAGACCTA | 371 | ALHTKDL | 1588 | 129.846 |
| 313 | GTCGACAAAAGCGAAGCCGTC | 372 | VDKSEAV | 1589 | 129.734 |
| 314 | GGGAGGACGGATCTTATGGCG | 373 | GRTDLMA | 1590 | 129.651 |
| 315 | GGCACGGAACCGCGCACTGCA | 374 | GTEPRTA | 1591 | 129.37 |
| 316 | AGAGGCGACATGTCACGAGAA | 375 | RGDMSRE | 1592 | 129.137 |
| 317 | CGGGGGGATACTAAGTCTAAG | 376 | RGDTKSK | 1593 | 128.94 |
| 318 | GGGACATTAGCCTCAATGTCC | 377 | GTLASMS | 1594 | 128.734 |
| 319 | CAGAAGTCTGTGACGTATTCG | 378 | QKSVTYS | 1595 | 128.602 |
| 320 | AGTACGGGGCAGACTCTTGTT | 379 | STGQTLV | 1596 | 128.1669 |
| 321 | TCGCACATAAACATGGGGTCG | 380 | SHINMGS | 1597 | 128.101 |
| 322 | GCGTTGAATGGTACTGGTAAT | 381 | ALNGTGN | 1598 | 128.045 |
| 323 | ACTACGAGTTCGAATCAGCAT | 382 | TTSSNQH | 1599 | 128.003 |
| 324 | AAAAACTACGCAAGCACCGAC | 383 | KNYASTD | 1600 | 127.84 |
| 325 | GAATCCACAAGCAGGACGTAC | 384 | ESTSRTY | 1601 | 127.765 |
| 326 | CCGCGTTCTATTACGGAGTTG | 385 | PRSITEL | 1602 | 127.623 |
| 327 | TACATAGCCGGAGGAGAAAAA | 386 | YIAGGEK | 1603 | 127.544 |
| 328 | ACTAGTAATTATATGCATGAG | 387 | TSNYMBE | 1604 | 127.522 |
| 329 | TTGGATCCTAATAGTACTCGG | 388 | LDPNSTR | 1605 | 127.175 |
| 330 | CACAGTGACATGGGCTCAAGC | 389 | HSDMGSS | 1606 | 127.01 |
| 331 | GACACCGCCAACCGATCCACA | 390 | DTANRST | 1607 | 127.01 |
| 332 | AACGCCGGACACAGCGGTCAA | 391 | NAGHSGQ | 1608 | 126.611 |
| 333 | AGTTTGGGGTCGGATCGTATG | 392 | SLGSDRM | 1609 | 126.579 |
| 334 | GACAACCAACAAGCCCTAGCT | 393 | DNQQALA | 1610 | 126.49 |
| 335 | CCATCCTCAGCGGGTAGCACA | 394 | PSSAGST | 1611 | 126.201 |
| 336 | GACAGGAAAGGGTACGACGCA | 395 | DRKGYDA | 1612 | 126.06 |
| 337 | GGAGGAAACCAAAACCTTACT | 396 | GGNQNLT | 1613 | 125.7806 |
| 338 | GTGAATCTGAATGAGACGGAG | 397 | VNLNETE | 1614 | 125.719 |
| 339 | TCCCCCGGCAACGGGTTGCTA | 398 | SPGNGLL | 1615 | 125.687 |
| 340 | TCTGTCGGGGACCTCACAAAA | 399 | SVGDLTK | 1616 | 125.627 |
| 341 | CGATACGAATCCGTCGGACTC | 400 | RYESVGL | 1617 | 125.54 |
| 342 | ACGAGAGAATTGACAAAAAAC | 401 | TRELTKN | 1618 | 125.47 |
| 343 | ACTCCAACTAACGGGAACCCT | 402 | TPTNGNP | 1619 | 125.37 |
| 344 | GCGACTGATCAGCGTTCGAGG | 403 | ATDQRSR | 1620 | 125.26 |
| 345 | GGAACATCGGCAGAATCACGC | 404 | GTSAESR | 1621 | 125.214 |
| 346 | AGGATGCTCTCTACTTTGCCT | 405 | RMLSTLP | 1622 | 125.088 |
| 347 | GGTATCAACTCCTCACACTTC | 406 | GINSSHE | 1623 | 125.044 |
| 348 | AGTAGCTCAACTGAAGGGCAA | 407 | SSSTEGQ | 1624 | 124.971 |
| 349 | GACAAACAACAAACCGGACAA | 408 | DKQQTGQ | 1625 | 124.923 |
| 350 | ACCCAACACCTACCATCCACA | 409 | TQHLPST | 1626 | 124.773 |
| 351 | GGTCTGGGGCAGCCTCAGTTG | 410 | GLGQPQL | 1627 | 124.752 |
| 352 | GTGACTAATGAGAGTCGTGCT | 411 | VTNESRA | 1628 | 124.728 |
| 353 | GGCAACTCGAACTACCGAGAA | 412 | GNSNYRE | 1629 | 124.482 |
| 354 | TGGAATGCTGAGAATAGTAAG | 413 | WNAENSK | 1630 | 124.373 |
| 355 | CCTGGGAGTCAGCGTCAGGAT | 414 | PGSQRQD | 1631 | 124.325 |
| 356 | CATACGTATTCGCAGGCTGAT | 415 | HTYSQAD | 1632 | 124.3 |
| 357 | ACTGCCGGCAACCTAAGAAGT | 416 | TAGNLRS | 1633 | 124.203 |
| 358 | GGCAGACACCTTCAATCGGAC | 417 | GRHLQSD | 1634 | 124.19 |
| 359 | AACAACGCACACACCGCCACT | 418 | NNAHTAT | 1635 | 124.118 |
| 360 | AGTACGAGTCAGGAGAATAGG | 419 | STSQENR | 1636 | 124.0658 |
| 361 | AGGGGTGATACTATGAATTAT | 420 | RGDTMNY | 1637 | 124.04 |
| 362 | CCGGTTGCTACTCAGCATGCG | 421 | PVATQHA | 1638 | 123.9189 |
| 363 | GGGCATTTGAATGCTCCGACT | 422 | GHLNAPT | 1639 | 123.495 |
| 364 | CAAATATTAAACTACTCAGTC | 423 | QILNYSV | 1640 | 123.4 |
| 365 | CAAAACCACGCGTCTGGTGAA | 424 | QNHASGE | 1641 | 123.372 |
| 366 | GGTTTAACAGGGCGGGAACTA | 425 | GLTGREL | 1642 | 123.32 |
| 367 | GACGTAGCCGTGACTCAACAC | 426 | DVAVTQH | 1643 | 123.31 |
| 368 | GCAACTTACACCGGGCGAACA | 427 | ATYTGRT | 1644 | 123.292 |
| 369 | AAAGAACTACAATGGCAACGA | 428 | KELQWQR | 1645 | 123.251 |
| 370 | GCTAGTTATAGTAGTATGGTG | 429 | ASYSSMV | 1646 | 123.193 |
| 371 | GTTATTAGTCATGGGGCGCTG | 430 | VISHGAL | 1647 | 123.094 |
| 372 | CCTATACACCACGGTTCATCC | 431 | PIHHGSS | 1648 | 123.09 |
| 373 | GTGGATAAGAATCATCCTTTG | 432 | VDKNHPL | 1649 | 123.04 |
| 374 | ACCTCGGGTGACCGGTACACG | 433 | TSGDRYT | 1650 | 122.844 |
| 375 | GGGACAAAAAGCTGGCCTGTC | 434 | GTKSWPV | 1651 | 122.8432 |
| 376 | TACAACGCCCACGAATCATTC | 435 | YNAHESF | 1652 | 122.813 |
| 377 | AGAGTCCACGACACTCCTTCA | 436 | RVHDTPS | 1653 | 122.7503 |
| 378 | GCACAAATCGAATCAGGCCGA | 437 | AQIESGR | 1654 | 122.66 |
| 379 | TGGAAGGATAATATGCGGATG | 438 | WKDNMRM | 1655 | 122.624 |
| 380 | ATGCCTAGTGAACCACCAGGG | 439 | MPSEPPG | 1656 | 122.51 |
| 381 | CGTGGTGATTATCCGACGTCG | 440 | RGDYPTS | 1657 | 122.487 |
| 382 | TTTCATAATGAGTCTTATGGG | 441 | FHNESYG | 1658 | 122.36 |
| 383 | TTGAATACGATGATTGATAAG | 442 | LNTMIDK | 1659 | 122.272 |
| 384 | TCCACACTAAGCCAAGGAGCA | 443 | STLSQGA | 1660 | 122.2662 |
| 385 | CCTTTGCACAACATACCTCCT | 444 | PLHNIPP | 1661 | 122.24 |
| 386 | GCTTCGTCTACGTTTTTGCCT | 445 | ASSTFLP | 1662 | 122.24 |
| 387 | ATGGAAGGAATGGGACTCGGA | 446 | MEGMGLG | 1663 | 122.04 |
| 388 | AAGGATTATAAGCCGTATGCT | 447 | KDYKPYA | 1664 | 121.95 |
| 389 | AATTTGCAGTCTGGTGTTCAG | 448 | NLQSGVQ | 1665 | 121.91 |
| 390 | ACAACTCTTAGCCAACAAAGC | 449 | TTLSQQS | 1666 | 121.82 |
| 391 | CTTATGTCGTCTACTTCCTCA | 450 | LMSSTSS | 1667 | 121.536 |
| 392 | ACTGGCCAAGGATTCTCGGCA | 451 | TGQGFSA | 1668 | 121.45 |
| 393 | TCTACAATCGGCAACAGCACG | 452 | STIGNST | 1669 | 121.27 |
| 394 | CTGAGGGCGAGTGAGGCTCCG | 453 | LRASEAP | 1670 | 121.2297 |
| 395 | CAGCCTAATAATGGTAATCAT | 454 | QPNNGNH | 1671 | 121.02 |
| 396 | TCGTCAGACGTTACCAGACAA | 455 | SSDVTRQ | 1672 | 120.98 |
| 397 | CGGGGTGACGCAACAGAAATG | 456 | RGDATEM | 1673 | 120.74 |
| 398 | TATAGGGGTAGGGAGGATTGG | 457 | YRGREDW | 1674 | 120.58 |
| 399 | AGCTTGCAACAATCACAATTG | 458 | SLQQSQL | 1675 | 120.491 |
| 400 | AAGCCGACTGCGAATGATTGG | 459 | KPTANDW | 1676 | 120.3784 |
| 401 | CGTCTGACTGATACTATGCAT | 460 | RLTDTMH | 1677 | 120.35 |
| 402 | CTTCATGGGAATTATAGTCCG | 461 | LHGNYSP | 1678 | 120.346 |
| 403 | ATTCCGGTTGGGGCGATGGCT | 462 | IPVGAMA | 1679 | 120.248 |
| 404 | CCGAACACCGCCTCAAACTTC | 463 | PNTASNF | 1680 | 120.24 |
| 405 | ACGAGTAGAGAAGTCAAAGGG | 464 | TSREVKG | 1681 | 120.171 |
| 406 | GACACGTCCTCCGGCAACAGG | 465 | DTSSGNR | 1682 | 119.94 |
| 407 | GAAGCAGTAACAAGTAAATGG | 466 | EAVTSKW | 1683 | 119.919 |
| 408 | CTAATCACAGCCACCACTAAC | 467 | LITATTN | 1684 | 119.872 |
| 409 | GATGGGGGTCGTTCGGGTATT | 468 | DGGRSGI | 1685 | 119.847 |
| 410 | TTCATGGAAGTCATGAAAAAC | 469 | FMEVMKN | 1686 | 119.82 |
| 411 | TCCTACCAAAACCCACCACCA | 470 | SYQNPPP | 1687 | 119.701 |
| 412 | ACTAATGTGACGTTTAAGCTT | 471 | TNVTFKL | 1688 | 119.681 |
| 413 | ATTTCTACGCATACGATGACG | 472 | ISTHTMT | 1689 | 119.64 |
| 414 | GAAACCCAAGGAGCAAGATAC | 473 | ETQGARY | 1690 | 119.591 |
| 415 | GCGGCTTATGAGCATGCGCCT | 474 | AAYEHAP | 1691 | 119.588 |
| 416 | TCAACGAACGACCGTGCGTTA | 475 | STNDRAL | 1692 | 119.57 |
| 417 | TTCACCGAACGCGCACTCCAA | 476 | FTERALQ | 1693 | 119.423 |
| 418 | GTAGCGGGCTTAGTCGACATA | 477 | VAGLVDI | 1694 | 119.41 |
| 419 | AGCTCGGTAACTAACCTTGCA | 478 | SSVTNLA | 1695 | 119.38 |
| 420 | GATACTACTACTGGTCATCTT | 479 | DTTTGHL | 1696 | 119.27 |
| 421 | ACGCGTAATTTGTCTGAGAGT | 480 | TRNLSES | 1697 | 118.919 |
| 422 | CAGGTGAATGTTGGGCCTGGT | 481 | QVNVGPG | 1698 | 118.831 |
| 423 | AAACAAACGATGTCCGACACA | 482 | KQTMSDT | 1699 | 118.829 |
| 424 | ATGTCGACAACCAGCAAAACT | 483 | MSTTSKT | 1700 | 118.7215 |
| 425 | ACTACAATAGGGACAAACCAA | 484 | TTIGTNQ | 1701 | 118.676 |
| 426 | GGGACTCTGACGCCGAATCTT | 485 | GTLTPNL | 1702 | 118.622 |
| 427 | TTTGATAGTTATAATATTGTG | 486 | FDSYNIV | 1703 | 118.51 |
| 428 | CGTGGTGCGCCTGAGCAAGCG | 487 | RGAPEQA | 1704 | 118.47 |
| 429 | ATCGAAAACGTAAACCACTTG | 488 | IENVNHL | 1705 | 118.42 |
| 430 | AGGTCTCTGGAGAGTCAGGCT | 489 | RSLESQA | 1706 | 118.231 |
| 431 | CAGTATACGAGTCTGAGTCCG | 490 | QYTSLSP | 1707 | 118.006 |
| 432 | ACGAAGGGTTATAATGATCTT | 491 | TKGYNDL | 1708 | 117.876 |
| 433 | GTCGCCTCGATGGTACACAAC | 492 | VASMVHN | 1709 | 117.874 |
| 434 | TCCACAACCCACACCTCAGCA | 493 | STTHTSA | 1710 | 117.821 |
| 435 | CTTGCGCACCCACAACCAAAC | 494 | LAHPQPN | 1711 | 117.542 |
| 436 | TCGATAAACAACATAGGCGCA | 495 | SINNIGA | 1712 | 117.538 |
| 437 | GCTATAGACTCCATCAAAATG | 496 | AIDSIKM | 1713 | 117.472 |
| 438 | TCTATGTATGGGCAGGCTGGG | 497 | SMYGQAG | 1714 | 117.362 |
| 439 | GAGTATGCTAATGCTAAGACT | 498 | EYANAKT | 1715 | 117.351 |
| 440 | TATCGGGCTTCGGATGTGGCG | 499 | YRASDVA | 1716 | 117.348 |
| 441 | GTTAGTTTGGAGAGTCGGTTG | 500 | VSLESRL | 1717 | 117.332 |
| 442 | ATTGAGACTAGTTCGCGTTCG | 501 | IETSSRS | 1718 | 117.176 |
| 443 | ATGGGAGTGAAACCCGAACAA | 502 | MGVKPEQ | 1719 | 116.975 |
| 444 | GCGCTTCCGTCTCGTGAGCGG | 503 | ALPSRER | 1720 | 116.914 |
| 445 | GGCACCGGATCTTCAGCGCAC | 504 | GTGSSAH | 1721 | 116.896 |
| 446 | CAAACGAACACCAACGACAGA | 505 | QTNTNDR | 1722 | 116.664 |
| 447 | GTATTACACTCTGTATCAGCA | 506 | VLHSVSA | 1723 | 116.583 |
| 448 | CCTTATTCTGCTACTGATCGG | 507 | PYSATDR | 1724 | 116.577 |
| 449 | GCAAACTCCGGATTACACAAC | 508 | ANSGLHN | 1725 | 116.505 |
| 450 | TATGAGAGTACTCATGTTAAT | 509 | YESTHVN | 1726 | 116.418 |
| 451 | AACAACGCACTAGTAGGAAGT | 510 | NNALVGS | 1727 | 116.34 |
| 452 | GGTATCAACTCCTCACACATC | 511 | GINSSHI | 1728 | 116.28 |
| 453 | AGTATTTCTGATAAGAATCAG | 512 | SISDKNQ | 1729 | 116.141 |
| 454 | GACCACCAACAAGCCCTAGCA | 513 | DHQQALA | 1730 | 116.13 |
| 455 | GACTCTACCAAAGCCATGCAA | 514 | DSTKAMQ | 1731 | 116.116 |
| 456 | ACTATTACTAGTCAGTCGGTG | 515 | TITSQSV | 1732 | 115.95 |
| 457 | GGCGCCCGTACAATCTTAGAC | 516 | GARTILD | 1733 | 115.938 |
| 458 | GAGCATAGTCCTACGACTGGT | 517 | EHSPTTG | 1734 | 115.8995 |
| 459 | GGGCTCACAGGATACCCAATG | 518 | GLTGYPM | 1735 | 115.844 |
| 460 | ACGATGGAATCCGGCCGCCAC | 519 | TMESGRH | 1736 | 115.82 |
| 461 | TCTGCGTCGAAAGTGGAATAC | 520 | SASKVEY | 1737 | 115.719 |
| 462 | GATAAGTCTAATTATAGTATT | 521 | DKSNYSI | 1738 | 115.714 |
| 463 | TTCAACGAAACTGCCGGGCGA | 522 | FNETAGR | 1739 | 115.65 |
| 464 | CAAAAATCGGAAACCTACACT | 523 | QKSETYT | 1740 | 115.528 |
| 465 | GCACTTACCCGTATGCCTAAC | 524 | ALTRMPN | 1741 | 115.476 |
| 466 | CGTAACGGCTCCGCCCAAAGC | 525 | RNGSAQS | 1742 | 115.465 |
| 467 | GCGAGGGATACGCCTGGGATT | 526 | ARDTPGI | 1743 | 115.432 |
| 468 | ATTGTTAATGCTGAGATTTAT | 527 | IVNAEIY | 1744 | 115.31 |
| 469 | CGACAAGGCGACTTAAAAGAA | 528 | RQGDLKE | 1745 | 115.3059 |
| 470 | CGAAACAACCCATCGCACGAC | 529 | RNNPSHD | 1746 | 115.224 |
| 471 | CTCGCCCACAACTACTTAAGC | 530 | LAHNYLS | 1747 | 115.195 |
| 472 | AACACCCACAACCTACAAATG | 531 | NTHNLQM | 1748 | 115.171 |
| 473 | CGAGGAGACCACAGCACACAG | 532 | RGDHSTQ | 1749 | 115.12 |
| 474 | CTCCACGGAGTCAGCAGTATA | 533 | LHGVSSI | 1750 | 115.105 |
| 475 | GGTATTAATCATGTGGCGTCT | 534 | GINHVAS | 1751 | 115.102 |
| 476 | ACTGATAAGCTTCAGGGTGTG | 535 | TDKLQGV | 1752 | 115.062 |
| 477 | GGAACCTCCATAGACTACGTA | 536 | GTSIDYV | 1753 | 115.053 |
| 478 | TCGAACACTGCCCCCCCCCCC | 537 | SNTAPPP | 1754 | 115.034 |
| 479 | ACTGCTAAGAGTTATGGGCCT | 538 | TAKSYGP | 1755 | 115.006 |
| 480 | GACCACCAACAAGCACTAGCT | 539 | DHQQALA | 1756 | 114.98 |
| 481 | ACACAAGTAGTCGCAAGAACA | 540 | TQVVART | 1757 | 114.9299 |
| 482 | AGTCCTCCTAGTACGTCGGGT | 541 | SPPSTSG | 1758 | 114.816 |
| 483 | CCTATGCGAACACCACCGTAC | 542 | PMRTPPY | 1759 | 114.806 |
| 484 | GCTGCTGGTAATACTACTCGT | 543 | AAGNTTR | 1760 | 114.78 |
| 485 | AGAGGCGACTAATCCACACCC | 544 | RGD*STP | 1761 | 114.78 |
| 486 | CTAGCGAAAACTGTCGCTATC | 545 | LAKTVAI | 1762 | 114.722 |
| 487 | TCTAAATCTGAAAACCTGCAA | 546 | SKSENLQ | 1763 | 114.59 |
| 488 | ACTCAGACGTCGTATGCTACG | 547 | TQTSYAT | 1764 | 114.505 |
| 489 | ACTGGGGATAGGACTTCGGTG | 548 | TGDRTSV | 1765 | 114.4766 |
| 490 | ATATCGCAAGGCTCGAGCCTC | 549 | ISQGSSL | 1766 | 114.305 |
| 491 | CTTGTTCAGATGGGGAGTGTG | 550 | LVQMGSV | 1767 | 114.256 |
| 492 | TTATCCGCAACATCTACGATG | 551 | LSATSTM | 1768 | 114.245 |
| 493 | CAAAACCACAACGAACTAAAA | 552 | QNHNELK | 1769 | 114.217 |
| 494 | CGTGGTGCGCCTGAGCATGCG | 553 | RGAPEHA | 1770 | 114.09 |
| 495 | TCTTCTTTCGGAAAAGACAAC | 554 | SSFGKDN | 1771 | 113.982 |
| 496 | AACGCTAACGCCGGTGGAAAC | 555 | NANAGGN | 1772 | 113.958 |
| 497 | GATCATCATCCTCAGAGTCGT | 556 | DHHPQSR | 1773 | 113.83 |
| 498 | ATGAGGCATGAGGCTCCTCTT | 557 | MRHEAPL | 1774 | 113.819 |
| 499 | AAGGGGGATGGTGCTTATGAG | 558 | KGDGAYE | 1775 | 113.742 |
| 500 | CCTATGAATGGTATTCTGTTG | 559 | PMNGILL | 1776 | 113.722 |
| 501 | AGTAGTGGGGGTATGAAGGCG | 560 | SSGGMKA | 1777 | 113.69 |
| 502 | GTGCTGGTTACTCAGAATCAT | 561 | VLVTQNH | 1778 | 113.631 |
| 503 | GAGATTAATAATCGGACTGGT | 562 | EINNRTG | 1779 | 113.588 |
| 504 | TTACCAACAGGCGTCCTGCCC | 563 | LPTGVLP | 1780 | 113.561 |
| 505 | GCCTACGGTATCAGAGAAGTG | 564 | AYGIREV | 1781 | 113.547 |
| 506 | TCGACAAACTCTATAGGCGCC | 565 | STNSIGA | 1782 | 113.471 |
| 507 | GTGCAGTTGACGCATAATGGG | 566 | VQLTHNG | 1783 | 113.43 |
| 508 | GTTCAGTTGGAGAATGCGAAT | 567 | VQLENAN | 1784 | 113.43 |
| 509 | GGAAAAGCCAACGACGGTTCT | 568 | GKANDGS | 1785 | 113.427 |
| 510 | ACCGGGGTTCGAGAAACCATA | 569 | TGVRETI | 1786 | 113.41 |
| 511 | GGCCTGAACCAGATCACATCG | 570 | GLNQITS | 1787 | 113.4 |
| 512 | ACGGAGAAGGCGAGTCCTCTG | 571 | TEKASPL | 1788 | 113.381 |
| 513 | TTTCTGGAGGGTGTTGCGCAG | 572 | FLEGVAQ | 1789 | 113.333 |
| 514 | ACGAATTATAATATTGGTCCG | 573 | TNYNIGP | 1790 | 113.318 |
| 515 | AGAGGAGACTTGACAACCACA | 574 | RGDLTTT | 1791 | 113.29 |
| 516 | ATGATGAATGTGAGTGGTCAT | 575 | MMNVSGH | 1792 | 113.09 |
| 517 | TCTCAGTCGATTAATGGGCTT | 576 | SQSINGL | 1793 | 113.084 |
| 518 | CTCACGACTTTAACTAACCAC | 577 | LTTLTNH | 1794 | 113.033 |
| 519 | AACTCTGTTCAATCCACCCCA | 578 | NSVQSTP | 1795 | 113.021 |
| 520 | TATAATACGGATCGGACTAAT | 579 | YNTDRTN | 1796 | 113.001 |
| 521 | GAGAAGCCTCAGCATAATAGT | 580 | EKPQHNS | 1797 | 112.98 |
| 522 | ACGATGGCTACAAACTTAAGT | 581 | TMATNLS | 1798 | 112.937 |
| 523 | GTGGGGACGCATTTGCATTCG | 582 | VGTHLHS | 1799 | 112.918 |
| 524 | GACGCCCACCACTCAAGCAGC | 583 | DAHHSSS | 1800 | 112.88 |
| 525 | CTTGTGGGGACTTTGGTGTAT | 584 | LVGTLVY | 1801 | 112.853 |
| 526 | TATGGTGTGCAGGCGAATAGT | 585 | YGVQANS | 1802 | 112.806 |
| 527 | GTTTTGTCTGATAAGGCGTAT | 586 | VLSDKAY | 1803 | 112.787 |
| 528 | CTTGAGGGTCAGAATAAGACG | 587 | LEGQNKT | 1804 | 112.731 |
| 529 | GAGGTTAGTAATAATAATTAT | 588 | EVSNNNY | 1805 | 112.69 |
| 530 | GCCCACCAACAAGCCCTAGCT | 589 | AHQQALA | 1806 | 112.67 |
| 531 | CTTCCGACCACACTCAACCAC | 590 | LPTTLNH | 1807 | 112.667 |
| 532 | TACATAGCAGGTGGTGAACAA | 591 | YIAGGEQ | 1808 | 112.6513 |
| 533 | AATTCTGGTACTCTTTATCAG | 592 | NSGTLYQ | 1809 | 112.609 |
| 534 | CGGGGTCTGCCTGATGTTAAT | 593 | RGLPDVN | 1810 | 112.43 |
| 535 | AACCAACAACTATCCCACTCA | 594 | NQQLSHS | 1811 | 112.375 |
| 536 | AATCCTAGTTATGATCATCGG | 595 | NPSYDHR | 1812 | 112.363 |
| 537 | ATAGACAGCGACACCTTCGTA | 596 | IDSDTFV | 1813 | 112.355 |
| 538 | ACCGCTTACCTTGCGGGATTA | 597 | TAYLAGL | 1814 | 112.17 |
| 539 | CATAGTAATGTTAGTCTTGAG | 598 | HSNVSLE | 1815 | 112.162 |
| 540 | GGTAATAATTTGAGTTTGTCT | 599 | GNNLSLS | 1816 | 112.16 |
| 541 | GTTATGGATACGCATGGGATG | 600 | VMDTHGM | 1817 | 112.145 |
| 542 | GCGTATAATATGTCGTCTGTT | 601 | AYNMSSV | 1818 | 112.14 |
| 543 | ACTAACGCCATCTCTCAAACG | 602 | TNAISQT | 1819 | 112.063 |
| 544 | GCAACACACGCCATGCGCCCA | 603 | ATHAMRP | 1820 | 112.016 |
| 545 | ATGTTAAACAACACAATGATG | 604 | MLNNTMM | 1821 | 111.939 |
| 546 | ATTAGTTCGGGGATTTTGTCG | 605 | ISSGILS | 1822 | 111.907 |
| 547 | CGCCAAGGCAGCTTGATGATA | 606 | RQGSLMI | 1823 | 111.83 |
| 548 | ACGACTGATAAGGGTATTAAT | 607 | TTDKGIN | 1824 | 111.818 |
| 549 | CACAACTTAATGACCCAAATA | 608 | HNLMTQI | 1825 | 111.77 |
| 550 | AACCAAAACACCTACGAACTG | 609 | NQNTYEL | 1826 | 111.756 |
| 551 | GCTAACACCGTCACAGAACGA | 610 | ANTVTER | 1827 | 111.7323 |
| 552 | TCTACGCTGCAGACTAATGGT | 611 | STLQTNG | 1828 | 111.683 |
| 553 | CCCAACGAATACAAAGCACCG | 612 | PNEYKAP | 1829 | 111.646 |
| 554 | ATGCAAACACGCTCGGACACA | 613 | MQTRSDT | 1830 | 111.629 |
| 555 | GGAACAGGGTACGCTGGATCA | 614 | GTGYAGS | 1831 | 111.6183 |
| 556 | ATGGGTATGCAGAATACGCAT | 615 | MGMQNTH | 1832 | 111.599 |
| 557 | TCTAGTAAGGAGCGTACATCG | 616 | SSKERTS | 1833 | 111.57 |
| 558 | CGAACGGACACCCCCTACACC | 617 | RTDTPYT | 1834 | 111.562 |
| 559 | ACTGCGCTGCGGGATAATAAG | 618 | TALRDNK | 1835 | 111.51 |
| 560 | AGGATGTCTGAGAGTTCGGAT | 619 | RMSESSD | 1836 | 111.51 |
| 561 | AACCAATCTATAAGCATGGAC | 620 | NQSISMD | 1837 | 111.491 |
| 562 | TCGCTTGGGCATAGTAATAAT | 621 | SLGHSNN | 1838 | 111.432 |
| 563 | CTTAATAGTGGTGGTGCGATG | 622 | LNSGGAM | 1839 | 111.361 |
| 564 | AACGAACAATTCGAAAAAGTC | 623 | NEQFEKV | 1840 | 111.341 |
| 565 | ATGATGGCGAATAATATGCAG | 624 | MMANNMQ | 1841 | 111.28 |
| 566 | AGTCGGCGCGAAGAACAACCA | 625 | SRREEQP | 1842 | 111.2512 |
| 567 | GCGACTATGACTTCGTCGACG | 626 | ATMTSST | 1843 | 111.238 |
| 568 | CGTGGTTCAGACGGAGGATTG | 627 | RGSDGGL | 1844 | 111.172 |
| 569 | AGTTTGACGCCTAATAATCTT | 628 | SLTPNNL | 1845 | 111.152 |
| 570 | GCTACTCTTTCTCCGCATGCT | 629 | ATLSPHA | 1846 | 111.132 |
| 571 | TATCTGCAGGAGAAGTTTCCT | 630 | YLQEKFP | 1847 | 111.112 |
| 572 | GGCACCGGGTACCCAAACCAA | 631 | GTGYPNQ | 1848 | 111.111 |
| 573 | AATTATCCTTCGGTTCAGGAG | 632 | NYPSVQE | 1849 | 111.07 |
| 574 | ACTGACGCATCGGGTAGATCA | 633 | TDASGRS | 1850 | 111.017 |
| 575 | CGTGTGATTACTGCGGGTGAT | 634 | RVITAGD | 1851 | 111.009 |
| 576 | GTGACTGTGAGTAATAGTCTG | 635 | VTVSNSL | 1852 | 110.95 |
| 577 | TTGTTGACGGCTCCGCATAGG | 636 | LLTAPHR | 1853 | 110.908 |
| 578 | TCAATCGCAAACCACATGATA | 637 | SIANHMI | 1854 | 110.861 |
| 579 | ATGCCTTCGAAAGGCGAAGTA | 638 | MPSKGEV | 1855 | 110.816 |
| 580 | AACATGACCAACGAACGGCTC | 639 | NMTNERL | 1856 | 110.801 |
| 581 | TCATTCTCTTCAGGCATAATG | 640 | SFSSGIM | 1857 | 110.771 |
| 582 | CGCGACCGTCAAGACTCGGTA | 641 | RDRQDSV | 1858 | 110.754 |
| 583 | CACGGTGACCGAACAGCTTTA | 642 | HGDRTAL | 1859 | 110.748 |
| 584 | GAAGTACGGGGCAGCGTGCCA | 643 | EVRGSVP | 1860 | 110.747 |
| 585 | CTGATTTCGACTGGTAATAAT | 644 | LISTGNN | 1861 | 110.735 |
| 586 | CCAACATCTGGGGACAAACCG | 645 | PTSGDKP | 1862 | 110.735 |
| 587 | AAAGCGGACCACAGTGGGGCA | 646 | KADHSGA | 1863 | 110.73 |
| 588 | CTAAACGACGTCTACCGTAAA | 647 | LNDVYRK | 1864 | 110.724 |
| 589 | AACAGTTTGCAAGCAAGTGCA | 648 | NSLQASA | 1865 | 110.72 |
| 590 | TATCATAATGAGATTATGACG | 649 | YHNEIMT | 1866 | 110.708 |
| 591 | AACAACACCCTAAACATCCTA | 650 | NNTLNIL | 1867 | 110.69 |
| 592 | TCTTATGGGCAGGGTCTGGAG | 651 | SYGQGLE | 1868 | 110.684 |
| 593 | ATGATAAAAACCAACATGTTG | 652 | MIKTNML | 1869 | 110.668 |
| 594 | ACCGAAGCGGGCCGCCCCCAA | 653 | TEAGRPQ | 1870 | 110.663 |
| 595 | AGGATTGATCAGACTAATGTG | 654 | RIDQTNV | 1871 | 110.624 |
| 596 | GAGGGGCATAATCGTGGTATT | 655 | EGHNRGI | 1872 | 110.559 |
| 597 | ATGGGGACTGAGTATCGTATG | 656 | MGTEYRM | 1873 | 110.524 |
| 598 | TCGGGTATGAATAGTAATAAG | 657 | SGMNSNK | 1874 | 110.499 |
| 599 | TTGACTAATGATAATAAGTTG | 658 | LTNDNKL | 1875 | 110.479 |
| 600 | TTACACAACTACCAAGACCGT | 659 | LHNYQDR | 1876 | 110.438 |
| 601 | AAGTCTAATTTGGAGGGTAAG | 660 | KSNLEGK | 1877 | 110.438 |
| 602 | CTTACTGGTCAGAATGCGATT | 661 | LTGQNAI | 1878 | 110.416 |
| 603 | CATACTGTGGGGGCTATGCAT | 662 | HTVGAMH | 1879 | 110.41 |
| 604 | CTCCAACTGGCTACATCCCAC | 663 | LQLATSH | 1880 | 110.384 |
| 605 | AGTCTGAATGGGGTGTTGGTT | 664 | SLNGVLV | 1881 | 110.359 |
| 606 | AGTCACAACCAAGTAAACGTA | 665 | SHNQVNV | 1882 | 110.349 |
| 607 | AGTTTGAGTACTGATGTGTTT | 666 | SLSTDVF | 1883 | 110.261 |
| 608 | ATGGTAGGTCGTGCCGAAATC | 667 | MVGRAEI | 1884 | 110.224 |
| 609 | TTGTCTAGTATGAGTACGGAT | 668 | LSSMSTD | 1885 | 110.204 |
| 610 | TCCTACAGTACTTCAACACCG | 669 | SYSTSTP | 1886 | 110.189 |
| 611 | TCCGAATTAATGGTCAGACCC | 670 | SELMVRP | 1887 | 110.0813 |
| 612 | TGGAACGGAAACGCCACACAA | 671 | WNGNATQ | 1888 | 110.039 |
| 613 | ATGGATACTGAGCTTTATAGG | 672 | MDTELYR | 1889 | 109.985 |
| 614 | AGGACGAGTCCTGATACGAAT | 673 | RTSPDTN | 1890 | 109.977 |
| 615 | TTCTCAACGCAAGACATAAGC | 674 | FSTQDIS | 1891 | 109.948 |
| 616 | ACGACTGTGCTGGGGAATAAT | 675 | TTVLGNN | 1892 | 109.94 |
| 617 | CAGCGTGATGCTGCGTATGCT | 676 | QRDAAYA | 1893 | 109.927 |
| 618 | CACCAAACCGTGGTCCCTACT | 677 | HQTVVPT | 1894 | 109.8948 |
| 619 | TCTAATCCGGGTAATCATAAT | 678 | SNPGNHN | 1895 | 109.853 |
| 620 | TGGGAGACTATGGCTAAGCCT | 679 | WETMAKP | 1896 | 109.818 |
| 621 | GGTCTTTATCAGAATCCTACG | 680 | GLYQNPT | 1897 | 109.73 |
| 622 | CTTAATCTTACTAATCATAAT | 681 | LNLTNHN | 1898 | 109.727 |
| 623 | ATGAGTCTCGCCTCCACCCAA | 682 | MSLASTQ | 1899 | 109.672 |
| 624 | ACGTCCCAAACCGTCCGAGTA | 683 | TSQTVRV | 1900 | 109.654 |
| 625 | GGAGCAACGGTCAACACGCGA | 684 | GATVNTR | 1901 | 109.64 |
| 626 | AAAGGGGGAAACCTCACCGCA | 685 | KGGNLTA | 1902 | 109.632 |
| 627 | GCGTGGTCTCAAGTCCTGACG | 686 | AWSQVLT | 1903 | 109.587 |
| 628 | GTAGAACACGTAGCCCACCAA | 687 | VEHVAHQ | 1904 | 109.552 |
| 629 | CTAATGTCGTCCTACTCATCA | 688 | LMSSYSS | 1905 | 109.546 |
| 630 | TCTCTGGGTGGGAATCCGCCT | 689 | SLGGNPP | 1906 | 109.511 |
| 631 | AAGAATGAGAATACGAATTAT | 690 | KNENTNY | 1907 | 109.5055 |
| 632 | ATATTGGACAACCACCGTTTC | 691 | ILDNHRF | 1908 | 109.489 |
| 633 | AATTCGTCGCATGTTAATTCT | 692 | NSSHVNS | 1909 | 109.473 |
| 634 | CAGGTGCAGCATGAGAGGGTG | 693 | QVQHERV | 1910 | 109.47 |
| 635 | TTGGGAGGAACCCTGGGAATA | 694 | LGGTLGI | 1911 | 109.46 |
| 636 | ACTCAAGAACGACCACTAATC | 695 | TQERPLI | 1912 | 109.455 |
| 637 | CGTAAGACTGAGGATAGGATG | 696 | RKTEDRM | 1913 | 109.429 |
| 638 | ACCGAACTCACAGCGCGGAAC | 697 | TELTARN | 1914 | 109.398 |
| 639 | CGCGGCGACAACACTTACTCC | 698 | RGDNTYS | 1915 | 109.387 |
| 640 | CAGTCTAATACTAATAATAGT | 699 | QSNTNNS | 1916 | 109.372 |
| 641 | GCTTCTTATAGTATTTCTGAT | 700 | ASYSISD | 1917 | 109.309 |
| 642 | AGCGAACACCACGCCGGAATA | 701 | SEHHAGI | 1918 | 109.281 |
| 643 | CGTGGTGCGCCAGAGCATGCG | 702 | RGAPEHA | 1919 | 109.237 |
| 644 | AATTTTAGTAGTGGTGATGTT | 703 | NFSSGDV | 1920 | 109.229 |
| 645 | AGTGGCATCAACGCCACCGAC | 704 | SGINATD | 1921 | 109.22 |
| 646 | CGGGCTGATGTTTCTTGGTCT | 705 | RADVSWS | 1922 | 109.213 |
| 647 | TGTATGGATGTTGGTAAGGCG | 706 | CMDVGKA | 1923 | 109.203 |
| 648 | GGGGTCGGAGCCACTTCGGTA | 707 | GVGATSV | 1924 | 109.193 |
| 649 | AAAAACAACAACTCAGACAGT | 708 | KNNNSDS | 1925 | 109.177 |
| 650 | AATGTTGCGAGTATTGATAGG | 709 | NVASIDR | 1926 | 109.174 |
| 651 | AATAGTGTGAATGGTCTTCTG | 710 | NSVNGLL | 1927 | 109.154 |
| 652 | ACACTAGACCGAAACCAAACC | 711 | TLDRNQT | 1928 | 109.132 |
| 653 | GACCAAAACTTCGAACGTAGA | 712 | DQNFERR | 1929 | 109.108 |
| 654 | GTCGGTGACAGGAACTTGGTC | 713 | VGDRNLV | 1930 | 109.062 |
| 655 | TTAGAAGTAAACCTGCAAACG | 714 | LEVNLQT | 1931 | 109.057 |
| 656 | ACTAATGGGGGGTCGCTTAAT | 715 | TNGGSLN | 1932 | 109.049 |
| 657 | TTCACGCGCACACCAGTAACC | 716 | FTRTPVT | 1933 | 109.033 |
| 658 | ACACCGGCGGAAAGCAAAGTT | 717 | TPAESKV | 1934 | 108.991 |
| 659 | TTTCCTTCGCATAATGGGGCG | 718 | FPSHNGA | 1935 | 108.959 |
| 660 | GCCAGGAACGTAATGCTGGGG | 719 | ARNVMLG | 1936 | 108.958 |
| 661 | ACGATTCAGGATCATATTAAG | 720 | TIQDHIK | 1937 | 108.942 |
| 662 | ATTAATTCGTATTTGCATGAG | 721 | INSYLHE | 1938 | 108.918 |
| 663 | GCGCATGATGTTACTGTGAAT | 722 | AHDVTVN | 1939 | 108.918 |
| 664 | ACTGTGGGGGTTCAGCAGACG | 723 | TVGVQQT | 1940 | 108.8891 |
| 665 | ACAGGTAGTTCAGACAGATTA | 724 | TGSSDRL | 1941 | 108.887 |
| 666 | AATCATGATACTGCTCATGCT | 725 | NHDTAHA | 1942 | 108.884 |
| 667 | GCCGAATCCCAACTAGCTAGC | 726 | AESQLAS | 1943 | 108.8752 |
| 668 | GGTAATGCGTATAATACGACT | 727 | GNAYNTT | 1944 | 108.818 |
| 669 | AATCATCAGGCTGGTACTACT | 728 | NHQAGTT | 1945 | 108.807 |
| 670 | ACGGTAGGAGAAAACCACCGA | 729 | TVGENHR | 1946 | 108.779 |
| 671 | CTAACTACTAAAATACCCCTC | 730 | LTTKIPL | 1947 | 108.773 |
| 672 | ACTAATTATCCTGAGGCGAAT | 731 | TNYPEAN | 1948 | 108.748 |
| 673 | AATACTGCTCCGCCGAATCAT | 732 | NTAPPNH | 1949 | 108.733 |
| 674 | GTGCTGAGTACGGGGCTGCGG | 733 | VLSTGLR | 1950 | 108.677 |
| 675 | CTCACGTCCCACTCTGCGGGC | 734 | LTSHSAG | 1951 | 108.648 |
| 676 | ATGAATAAGCATGGTGTGCTT | 735 | MNKHGVL | 1952 | 108.5736 |
| 677 | GACCTGACCAGAGCTGCAATA | 736 | DLTRAAI | 1953 | 108.552 |
| 678 | TATATTGTGGATCATGCGAAT | 737 | YIVDHAN | 1954 | 108.526 |
| 679 | AGTGGGCCTGAGAATACGTTG | 738 | SGPENTL | 1955 | 108.526 |
| 680 | CGTTATGGTGATACGGGTATG | 739 | RYGDTGM | 1956 | 108.512 |
| 681 | GATGGTAAGAATAGTTATGCG | 740 | DGKNSYA | 1957 | 108.451 |
| 682 | GAGGCGCATAATCGTGTTATT | 741 | EAHNRVI | 1958 | 108.451 |
| 683 | AGTTTGCAGGCTGGTAGGATG | 742 | SLQAGRM | 1959 | 108.3681 |
| 684 | GATGCGAAGGCTCTTACGACT | 743 | DAKALTT | 1960 | 108.368 |
| 685 | ACCGACACCCGAAAAAACGAC | 744 | TDTRKND | 1961 | 108.357 |
| 686 | GACTCTTCACACTACTCGACA | 745 | DSSHYST | 1962 | 108.219 |
| 687 | ACAATGCACCTTCCCAACCTG | 746 | TMHLPNL | 1963 | 108.214 |
| 688 | CGAGACGGCTCTACTAAAGTT | 747 | RDGSTKV | 1964 | 108.207 |
| 689 | TCAGGGTACCAAATGACAGAA | 748 | SGYQMTE | 1965 | 108.16 |
| 690 | TGCGACTTGTCACAATCATGC | 749 | CDLSQSC | 1966 | 108.133 |
| 691 | AGAAACGCGTCAAACGGCGTA | 750 | RNASNGV | 1967 | 108.044 |
| 692 | CAGTCGCAGAATGTGACTCAG | 751 | QSQNVTQ | 1968 | 108.033 |
| 693 | GATTCTGCTCCGAGTACTATT | 752 | DSAPSTI | 1969 | 108.003 |
| 694 | AGGTCCGTACCATCACCACAC | 753 | RSVPSPH | 1970 | 108.001 |
| 695 | ATGACGTCTGCGTCTCGTGGT | 754 | MTSASRG | 1971 | 107.974 |
| 696 | GCTCTTGCTAGTCGTCCTATG | 755 | ALASRPM | 1972 | 107.907 |
| 697 | CTAAACCTCTCCAACGACTGG | 756 | LNLSNDW | 1973 | 107.899 |
| 698 | GTTTCTACGGCGCAGAGGCAG | 757 | VSTAQRQ | 1974 | 107.896 |
| 699 | CACGCCGACGTTGGCATGAGC | 758 | HADVGMS | 1975 | 107.888 |
| 700 | GCGGGGGGTTTGCTGTCGCGG | 759 | AGGLLSR | 1976 | 107.878 |
| 701 | CATCTTAGTCAGGCTAATCAT | 760 | HLSQANH | 1977 | 107.848 |
| 702 | GTGCATAATCCTACTACTACG | 761 | VHNPTTT | 1978 | 107.8152 |
| 703 | TCTCAGCGGAATCCGGATGAT | 762 | SQRNPDD | 1979 | 107.784 |
| 704 | AGGGAGACTAATAATTTTGCG | 763 | RETNNFA | 1980 | 107.771 |
| 705 | AATGCGGGGGCTCTTATGGGT | 764 | NAGALMG | 1981 | 107.764 |
| 706 | TTGCCGAAGACTGTGAATATG | 765 | LPKTVNM | 1982 | 107.738 |
| 707 | GCAAGTGACCTACAAATGACG | 766 | ASDLQMT | 1983 | 107.723 |
| 708 | CAAGCCCTGGCCACCACAAAC | 767 | QALATTN | 1984 | 107.716 |
| 709 | CATGAGTCGTCTGGTTATCAT | 768 | HESSGYH | 1985 | 107.696 |
| 710 | GGGGTGAATGATCGTGCTAGG | 769 | GVNDRAR | 1986 | 107.69 |
| 711 | CCTCGGGATGCTCTTCGTACT | 770 | PRDALRT | 1987 | 107.673 |
| 712 | AACGACTCCTCGTCAATGTCC | 771 | NDSSSMS | 1988 | 107.641 |
| 713 | GAATACAACACGCGCCACGAC | 772 | EYNTRHD | 1989 | 107.611 |
| 714 | GCGTCTCCGGCGCATACGTCT | 773 | ASPAHTS | 1990 | 107.598 |
| 715 | CAAAACAGCAACACTCCCTCA | 774 | QNSNTPS | 1991 | 107.546 |
| 716 | TTGGCAAAACTAGGGAACTAC | 775 | LAKLGNY | 1992 | 107.541 |
| 717 | GCTAGTGATAGGCAGTCTGGT | 776 | ASDRQSG | 1993 | 107.527 |
| 718 | TATCAGAATGGTGTGCTTCCT | 777 | YQNGVLP | 1994 | 107.5199 |
| 719 | AATAAGTTTGGTTATAATCCT | 778 | NKFGYNP | 1995 | 107.513 |
| 720 | AAAAAAACCAACGGAATCCCC | 779 | KKTNGIP | 1996 | 107.5 |
| 721 | GTTAACGACAACCGAGGAAAC | 780 | VNDNRGN | 1997 | 107.4937 |
| 722 | ATGCACACCATAACGGGATCC | 781 | MHTITGS | 1998 | 107.491 |
| 723 | ATTGATGGTGTTCAGAAGCTT | 782 | IDGVQKL | 1999 | 107.489 |
| 724 | GCGCAGGTTAATAATCATGAT | 783 | AQVNNHD | 2000 | 107.489 |
| 725 | GTTTCTTCGCCTAATGGTACG | 784 | VSSPNGT | 2001 | 107.487 |
| 726 | GATTCTGCTCCGAGGGCTATT | 785 | DSAPRAI | 2002 | 107.455 |
| 727 | TCTGCGAGTGATAGTCAGCAT | 786 | SASDSQH | 2003 | 107.455 |
| 728 | TCGGCTCATCAGACGCCGACG | 787 | SAHQTPT | 2004 | 107.427 |
| 729 | GCGACGCTGAATAATAGTTAT | 788 | ATLNNSY | 2005 | 107.411 |
| 730 | GAAGACAGTATGAGATTCTCT | 789 | EDSMRFS | 2006 | 107.407 |
| 731 | GAACGAAACGGACTAATAGAA | 790 | ERNGLIE | 2007 | 107.405 |
| 732 | TTAGTACTTGACTCACGGAAC | 791 | LVLDSRN | 2008 | 107.382 |
| 733 | ACCGTCGAACAAATAAACTCG | 792 | TVEQINS | 2009 | 107.349 |
| 734 | GGGACAGGTACCGTTGGATGG | 793 | GTGTVGW | 2010 | 107.203 |
| 735 | AATCAGCAGCGTATTGATAAT | 794 | NQQRIDN | 2011 | 107.185 |
| 736 | ATCCAAAACGGGGTCCTGCCA | 795 | IQNGVLP | 2012 | 107.184 |
| 737 | GGAGACATCTCAAGCAGAAAC | 796 | GDISSRN | 2013 | 107.1386 |
| 738 | GTCACTGGCACTACCCCGGGA | 797 | VTGTTPG | 2014 | 107.137 |
| 739 | ACAAGGGAATCAATGTCCATC | 798 | TRESMSI | 2015 | 107.071 |
| 740 | CACACTTACTCACAAGCAGAC | 799 | HTYSQAD | 2016 | 107.012 |
| 741 | TCCAACATGGGCGTAGCCTCT | 800 | SNMGVAS | 2017 | 106.985 |
| 742 | CACGACTTGAACCACGGAAAA | 801 | HDLNHGK | 2018 | 106.942 |
| 743 | CTGTACGGGGGAGCACACCAA | 802 | LYGGAHQ | 2019 | 106.904 |
| 744 | AACGTGTACGGAGACGGAATA | 803 | NVYGDGI | 2020 | 106.87 |
| 745 | TCTACTATTAATATGCGTGCG | 804 | STINMRA | 2021 | 106.868 |
| 746 | AAGATGGGGAGTATTGAGGTT | 805 | KMGSIEV | 2022 | 106.864 |
| 747 | TCCGAAACGCGCGCTGGATAC | 806 | SETRAGY | 2023 | 106.85 |
| 748 | AATGTGGGTAATACTCTTGGG | 807 | NVGNTLG | 2024 | 106.842 |
| 749 | ATTGGTGGGACTGATACGCGG | 808 | IGGTDTR | 2025 | 106.786 |
| 750 | GCCGACAAAGGATTCGGCCAC | 809 | ADKGFGH | 2026 | 106.73 |
| 751 | TGGCAGGATCATAATAAGGTG | 810 | WQDHNKV | 2027 | 106.719 |
| 752 | AACTACGGTTCCGGACGAATC | 811 | NYGSGRI | 2028 | 106.701 |
| 753 | ACTCATAAGCAGGTGGATCTT | 812 | THKQVDL | 2029 | 106.695 |
| 754 | CGGCAGAATGATAAGGGTAAT | 813 | RQNDKGN | 2030 | 106.658 |
| 755 | GGTAGGAATGAGAGTCCGGAG | 814 | GRNESPE | 2031 | 106.658 |
| 756 | GTTTTTACTGGGCAGACGGAG | 815 | VFTGQTE | 2032 | 106.632 |
| 757 | TATGTTGATCGTAAGGATAAT | 816 | YVDRKDN | 2033 | 106.631 |
| 758 | AATAATACTTTGAATATTTTG | 817 | NNTLNIL | 2034 | 106.63 |
| 759 | TTGAGCTACAGCATCCAACAC | 818 | LSYSIQH | 2035 | 106.621 |
| 760 | GCTACCAACAGATCGCCCCTA | 819 | ATNRSPL | 2036 | 106.5898 |
| 761 | GTTCACACCGCAGACACAATA | 820 | VHTADTI | 2037 | 106.564 |
| 762 | GGGCATTTGGTTAATATGTCT | 821 | GHLVNMS | 2038 | 106.56 |
| 763 | TTAGACTACACCCCTCAAAAC | 822 | LDYTPQN | 2039 | 106.519 |
| 764 | TCCGCCTCTTACTCCAGGATG | 823 | SASYSRM | 2040 | 106.501 |
| 765 | TCCGGAGCGGCACAAAACCCA | 824 | SGAAQNP | 2041 | 106.499 |
| 766 | AGAAACACACTTGCTGACCTT | 825 | RNTLADL | 2042 | 106.496 |
| 767 | GGTTCTACGGTGTCGGCGCAG | 826 | GSTVSAQ | 2043 | 106.491 |
| 768 | TCTAAGGATAGTACTATGTAT | 827 | SKDSTMY | 2044 | 106.48 |
| 769 | GTGGTGGTTCACACTATCCCA | 828 | VVVHTIP | 2045 | 106.45 |
| 770 | CCACGTACTGTCTCATTGGAC | 829 | PRTVSLD | 2046 | 106.4434 |
| 771 | ATGATGAAGAGTGAGGAGAAT | 830 | MMKSEEN | 2047 | 106.425 |
| 772 | ACCACCGACCGGCCAAACGGA | 831 | TTDRPNG | 2048 | 106.406 |
| 773 | CATAGTCCTCCTACGACTATG | 832 | HSPPTTM | 2049 | 106.376 |
| 774 | GGCCAATGGACAACAGGGACA | 833 | GQWTTGT | 2050 | 106.357 |
| 775 | GACGGTATGAACGGAGTGGGT | 834 | DGMNGVG | 2051 | 106.317 |
| 776 | CTTCATACTGTTGCGAATGAG | 835 | LHTVANE | 2052 | 106.312 |
| 777 | TATACGTCGCAGACGTCTACG | 836 | YTSQTST | 2053 | 106.2842 |
| 778 | AACTTCTCCGAAATGTCCACA | 837 | NFSEMST | 2054 | 106.27 |
| 779 | ATTAATATTCGTAGTGATTTG | 838 | INIRSDL | 2055 | 106.266 |
| 780 | CCCTCCAACAGTGAAAGATTC | 839 | PSNSERF | 2056 | 106.249 |
| 781 | TATACGAATTATGGGGATCTT | 840 | YTNYGDL | 2057 | 106.241 |
| 782 | GATAAGAGTACGGCGCAGGCG | 841 | DKSTAQA | 2058 | 106.238 |
| 783 | CACACCGACATGGTATCCTCT | 842 | HTDMVSS | 2059 | 106.222 |
| 784 | AACAAAAGTCTGTCAATGGAC | 843 | NKSLSMD | 2060 | 106.196 |
| 785 | GGGCACTACGCTACAAACACA | 844 | GHYATNT | 2061 | 106.158 |
| 786 | GTCATCGTATCTACAAAATCA | 845 | VIVSTKS | 2062 | 106.124 |
| 787 | ACTCATAGTCTTATGAATGAT | 846 | THSLMND | 2063 | 106.116 |
| 788 | AACTACCACGGAGACAACGTT | 847 | NYHGDNV | 2064 | 106.106 |
| 789 | CGTGATGATCAGCAGCTTGAT | 848 | RDDQQLD | 2065 | 106.064 |
| 790 | GATGATAAGACTGGTCGGTAT | 849 | DDKTGRY | 2066 | 106.055 |
| 791 | GGGTCGAGCCAACACCACGAA | 850 | GSSQHHE | 2067 | 106.042 |
| 792 | CGTGTTACAGGTGTCTCAACA | 851 | RVTGVST | 2068 | 106.017 |
| 793 | AGTACTGCGTCGGGGCATACT | 852 | STASGHT | 2069 | 106.007 |
| 794 | ACTAACAACCTCTCATACGAA | 853 | TNNLSYE | 2070 | 105.998 |
| 795 | CAGCATAATAGTGCGTCGGCG | 854 | QHNSASA | 2071 | 105.987 |
| 796 | CCGGCTAAGGGTTTTGGTCAT | 855 | PAKGFGH | 2072 | 105.9781 |
| 797 | TGGTACGAAACAATCAGCCCG | 856 | WYETISP | 2073 | 105.959 |
| 798 | ACGGATGCTACGGGGAGGCAT | 857 | TDATGRH | 2074 | 105.942 |
| 799 | ATTCAGGCGAAGAATTCTGAG | 858 | IQAKNSE | 2075 | 105.939 |
| 800 | AGTACTGAGACTAGGGGTGGG | 859 | STETRGG | 2076 | 105.926 |
| 801 | TTCTCAACAAACTCTGTAATC | 860 | FSTNSVI | 2077 | 105.918 |
| 802 | TCTAACCTTCGAAACACAATA | 861 | SNLRNTI | 2078 | 105.854 |
| 803 | GGGATGATCGGGCACAACGCA | 862 | GMIGHNA | 2079 | 105.832 |
| 804 | TCTGGCCAAGGATTCTCGGCA | 863 | SGQGFSA | 2080 | 105.831 |
| 805 | ACCCACAACTCTACAGGCCTT | 864 | THNSTGL | 2081 | 105.802 |
| 806 | AGGATTGATAGTGCTATGGTG | 865 | RIDSAMV | 2082 | 105.8 |
| 807 | GTCGCTATGGGAGGCGGTCCC | 866 | VAMGGGP | 2083 | 105.795 |
| 808 | GGCTCTCACAACGGCCCAGCC | 867 | GSHNGPA | 2084 | 105.763 |
| 809 | CACTCCGCAGCGGGTGACGGT | 868 | HSAAGDG | 2085 | 105.73 |
| 810 | GCACAAGGCATAACCCACGCT | 869 | AQGITHA | 2086 | 105.711 |
| 811 | TCTGCGCTTTTGCGGATGGAT | 870 | SALLRMD | 2087 | 105.707 |
| 812 | TGGCAAATGGGGGCCGGGAGC | 871 | WQMGAGS | 2088 | 105.698 |
| 813 | ATAGACTCGCACGCCAGCATA | 872 | IDSHASI | 2089 | 105.695 |
| 814 | AGCCTAGACCACGCCCCTCTA | 873 | SLDHAPL | 2090 | 105.661 |
| 815 | GAAAACAACATGCAACACGGC | 874 | ENNMQHG | 2091 | 105.651 |
| 816 | AAGGGTGCGCAGGGTGTTCAG | 875 | KGAQGVQ | 2092 | 105.646 |
| 817 | GTCGCTGTATCGAACACTCCA | 876 | VAVSNTP | 2093 | 105.643 |
| 818 | GTTGAGTCTTCTTATTCTCGG | 877 | VESSYSR | 2094 | 105.633 |
| 819 | CATAATACGGAGTCTAAGACT | 878 | HNTESKT | 2095 | 105.625 |
| 820 | AATGAGAGTACGAAGGAGAGT | 879 | NESTKES | 2096 | 105.599 |
| 821 | GATGTTTATCTTAAGAGTCCG | 880 | DVYLKSP | 2097 | 105.586 |
| 822 | CAGTCGGGGGCTAGGACTCTG | 881 | QSGARTL | 2098 | 105.5854 |
| 823 | TCGAACAGTCAAGTACACAAC | 882 | SNSQVHN | 2099 | 105.573 |
| 824 | GTAGTCTCATCGGGCGGCTGG | 883 | VVSSGGW | 2100 | 105.551 |
| 825 | CCATCAAGTTTCAACAGCGCC | 884 | PSSFNSA | 2101 | 105.542 |
| 826 | AAGCAGACTGATAGTAGGGGT | 885 | KQTDSRG | 2102 | 105.5 |
| 827 | AACACAACGCCACCTAACCAC | 886 | NTTPPNH | 2103 | 105.483 |
| 828 | CAAAACGGAACCTCGTCTATA | 887 | QNGTSSI | 2104 | 105.483 |
| 829 | CTCATGAAAGACATGGAATCC | 888 | LMKDMES | 2105 | 105.458 |
| 830 | ACTCAGACTGGTCATGTTTCT | 889 | TQTGHVS | 2106 | 105.4558 |
| 831 | GAAATACACACGACCACAGGC | 890 | EIHTTTG | 2107 | 105.449 |
| 832 | ATACAAACTACTACAAAATGC | 891 | IQTTTKC | 2108 | 105.442 |
| 833 | CCCGCTGAAGGAAACAACCGT | 892 | PAEGNNR | 2109 | 105.442 |
| 834 | TACATCGCCGGAGGGGAACAA | 893 | YIAGGEQ | 2110 | 105.415 |
| 835 | GAAGTACGCGACCAAAAAACA | 894 | EVRDQKT | 2111 | 105.375 |
| 836 | TACGCCGTCGCGATAGGCACA | 895 | YAVAIGT | 2112 | 105.366 |
| 837 | TCCGCTAACGAACACAACCAC | 896 | SANEHNH | 2113 | 105.337 |
| 838 | GGGATGAGGGATACGCCGCCG | 897 | GMRDTPP | 2114 | 105.322 |
| 839 | GCTCAGCAGATTGTTAATGGG | 898 | AQQIVNG | 2115 | 105.321 |
| 840 | TCAAGTTCCCAAACGGTTTTG | 899 | SSSQTVL | 2116 | 105.321 |
| 841 | GTTATTCAGTCTGATAATACG | 900 | VIQSDNT | 2117 | 105.32 |
| 842 | GTTCCGGCGCATTCTCGGGGT | 901 | VPAHSRG | 2118 | 105.305 |
| 843 | TCGAATACGGGGTCGTTGGGT | 902 | SNTGSLG | 2119 | 105.2779 |
| 844 | TGGGCCAAAGACGTCAACGTC | 903 | WAKDVNV | 2120 | 105.273 |
| 845 | AATGTGTTGGGTGCTTCGAGT | 904 | NVLGASS | 2121 | 105.187 |
| 846 | ACTCCGGAGGCTAGTGCGCGT | 905 | TPEASAR | 2122 | 105.173 |
| 847 | AATTATAATGGGGTTAATGTG | 906 | NYNGVNV | 2123 | 105.152 |
| 848 | AACACAACCGGTAGCTCGGGC | 907 | NTTGSSG | 2124 | 105.145 |
| 849 | TCCAGCGGCCAACCGCTCGTC | 908 | SSGQPLV | 2125 | 105.136 |
| 850 | CAGGCGGGGGGTGTGGCGAGT | 909 | QAGGVAS | 2126 | 105.133 |
| 851 | CCGCTTCAATCCCAATCGGGA | 910 | PLQSQSG | 2127 | 105.133 |
| 852 | CAACGTACCTCGGAAGCGCCA | 911 | QRTSEAP | 2128 | 105.128 |
| 853 | TTGGCTAAGACGGTTGCGATT | 912 | LAKTVAI | 2129 | 105.1155 |
| 854 | ACCCACACCCTTGGGGGAACA | 913 | THTLGGT | 2130 | 105.08 |
| 855 | CACGACTACAGTATGAACGCG | 914 | HDYSMNA | 2131 | 105.079 |
| 856 | GGGAAACCTGCGGAAGCGCCG | 915 | GKPAEAP | 2132 | 105.055 |
| 857 | AGAAACGAAAACGTAAACGCT | 916 | RNENVNA | 2133 | 105.051 |
| 858 | AGTTCTCGGGAGGCGAAGTTT | 917 | SSREAKF | 2134 | 105.0379 |
| 859 | TCTTCTTCTGATAGTCCGCGT | 918 | SSSDSPR | 2135 | 105.035 |
| 860 | ATGAATACGACTTATAATGAG | 919 | MNTTYNE | 2136 | 105.031 |
| 861 | GTAAGGAGTGGAATAAAACCA | 920 | VRSGIKP | 2137 | 105.008 |
| 862 | CAGGAGAATCCTATGAAGATG | 921 | QENPMKM | 2138 | 104.926 |
| 863 | ACTGAGCCGCTTCCGATGTCT | 922 | TEPLPMS | 2139 | 104.869 |
| 864 | CGCCACGGGGACACACCGATG | 923 | RHGDTPM | 2140 | 104.844 |
| 865 | GCGGTGAATACGTATAATAGT | 924 | AVNTYNS | 2141 | 104.82 |
| 866 | GCGTCGACTGAGTCTCATGTG | 925 | ASTESHV | 2142 | 104.816 |
| 867 | ACAAACCTAAGTCAATCGGCC | 926 | TNLSQSA | 2143 | 104.791 |
| 868 | GAGCTGTCTACTCCTATGGTT | 927 | ELSTPMV | 2144 | 104.783 |
| 869 | TATGCGCATCCTGTGACTCAT | 928 | YAHPVTH | 2145 | 104.76 |
| 870 | CGGGGGTCTACTGGTACGCAG | 929 | RGSTGTQ | 2146 | 104.749 |
| 871 | TGTGTTGGTTCGTGTGGTGTG | 930 | CVGSCGV | 2147 | 104.738 |
| 872 | TCGGTTGCTAAGGATCAGACG | 931 | SVAKDQT | 2148 | 104.736 |
| 873 | ACGAATCTTTCTCCTAAGACG | 932 | TNLSPKT | 2149 | 104.6855 |
| 874 | CTAGGTTTCACACCCCAACCG | 933 | LGFTPQP | 2150 | 104.677 |
| 875 | AATATTAGTAGTATTAATCAG | 934 | NISSINQ | 2151 | 104.657 |
| 876 | GTTTACGACAACGTTTCTTCT | 935 | VYDNVSS | 2152 | 104.657 |
| 877 | AGTGGAAAACAAGACAAATAC | 936 | SGKQDKY | 2153 | 104.654 |
| 878 | AGACTTACAGAACTGGTCATA | 937 | RLTELVI | 2154 | 104.651 |
| 879 | CATAAGAGTGAGAGTCATAAT | 938 | HKSESHN | 2155 | 104.626 |
| 880 | GAGGCGACTCATGGTTCTTAT | 939 | EATHGSY | 2156 | 104.613 |
| 881 | AACCTACTTGTCGACCAACGT | 940 | NLLVDQR | 2157 | 104.579 |
| 882 | AATATTAATGATACTAAGAAT | 941 | NINDTKN | 2158 | 104.522 |
| 883 | CTTGCGGTTACGAATGTGCGG | 942 | LAVTNVR | 2159 | 104.498 |
| 884 | CCGTCGACACTCGCTGAAACA | 943 | PSTLAET | 2160 | 104.449 |
| 885 | CCGAAGCCTGGGACGGGGGAG | 944 | PKPGTGE | 2161 | 104.427 |
| 886 | GTGCTGTTGCAGAATTCTCAT | 945 | VLLQNSH | 2162 | 104.416 |
| 887 | TACGGTAACGCGAACACCGTA | 946 | YGNANTV | 2163 | 104.386 |
| 888 | ACATCTGGAGTTCTGACACGC | 947 | TSGVLTR | 2164 | 104.375 |
| 889 | AAAATAACGGAAACCAACCTC | 948 | KITETNL | 2165 | 104.359 |
| 890 | GTTCGCAGAGACGAAACACCT | 949 | VRRDETP | 2166 | 104.359 |
| 891 | TCTAAAATGTCAAACCCAGTG | 950 | SKMSNPV | 2167 | 104.352 |
| 892 | TGGGAATCCCTCTCCAACGCA | 951 | WESLSNA | 2168 | 104.349 |
| 893 | GCCAACGGAGGAGGATACCCC | 952 | ANGGGYP | 2169 | 104.34 |
| 894 | ATGTTGGCTTCTCGGGTGCCT | 953 | MLASRVP | 2170 | 104.336 |
| 895 | TGCGGCCTGAACTGCGGTAAA | 954 | CGLNCGK | 2171 | 104.331 |
| 896 | ACTATTACTAGTCCGTCGGTG | 955 | TITSPSV | 2172 | 104.3055 |
| 897 | TGGTCGAATGCTCAGAGTCCG | 956 | WSNAQSP | 2173 | 104.288 |
| 898 | ACAGAAAGCCCCAAACTACTA | 957 | TESPKLL | 2174 | 104.283 |
| 899 | CATTTGGTTACTAGTGGTATT | 958 | HLVTSGI | 2175 | 104.273 |
| 900 | CCTCCTAAGTCGGATTCGAAT | 959 | PPKSDSN | 2176 | 104.265 |
| 901 | ATTGCGGTGCATGTGCTGAGT | 960 | IAVHVLS | 2177 | 104.254 |
| 902 | ACTGGTACTGCGACTTTGCCT | 961 | TGTATLP | 2178 | 104.254 |
| 903 | AATACTACTCCGCCTAATCAT | 962 | NTTPPNH | 2179 | 104.232 |
| 904 | TGCACCGCCACAAAATGCTCA | 963 | CTATKCS | 2180 | 104.23 |
| 905 | CACAGTGACATGGTCAGCGGC | 964 | HSDMVSG | 2181 | 104.208 |
| 906 | CCAAACGCACACCACCTGCCC | 965 | PNAHHLP | 2182 | 104.2 |
| 907 | TCTAATAATATGAATCAGGCG | 966 | SNNMNQA | 2183 | 104.187 |
| 908 | AGTGATAATAATAGGGCTAAT | 967 | SDNNRAN | 2184 | 104.1865 |
| 909 | TTGCAGACGCCTGGGACGACG | 968 | LQTPGTT | 2185 | 104.169 |
| 910 | GTGCGCGGCGTTCAAGACGCC | 969 | VRGVQDA | 2186 | 104.167 |
| 911 | TCTCTAGACTCGCGCTCCTCG | 970 | SLDSRSS | 2187 | 104.14 |
| 912 | GTTTGTGTTACTACTTGTGCT | 971 | VCVTTCA | 2188 | 104.137 |
| 913 | CCGAATACTAATCATCTTGTG | 972 | PNTNHLV | 2189 | 104.121 |
| 914 | CTCATGTCAGGGAAAGAAAAC | 973 | LMSGKEN | 2190 | 104.109 |
| 915 | ACTTCTGCTAGTGAGAATTGG | 974 | TSASENW | 2191 | 104.108 |
| 916 | TTTTTGCCGCAGCTGGGGCAG | 975 | FLPQLGQ | 2192 | 104.094 |
| 917 | CCTTTTAATCCTGGGAATGTG | 976 | PFNPGNV | 2193 | 104.0922 |
| 918 | GGGACACCTGGTCAAAGTATA | 977 | GTPGQSI | 2194 | 104.092 |
| 919 | TATAATAATGGTGGGCATGTT | 978 | YNNGGHV | 2195 | 104.085 |
| 920 | CTCGGAAACCACTACACACCC | 979 | LGNHYTP | 2196 | 104.064 |
| 921 | CAAGTCAACCAACCGAGAATA | 980 | QVNQPRI | 2197 | 104.061 |
| 922 | TTAGGAAACAACCGGCCACTA | 981 | LGNNRPL | 2198 | 104.06 |
| 923 | CCTCCGGAAAGTGCCAGGGGC | 982 | PPESARG | 2199 | 104.023 |
| 924 | AAATCTGTAGGCGACGGGAGA | 983 | KSVGDGR | 2200 | 104.0009 |
| 925 | TCACTTCGGACGGACGAATTC | 984 | SLRTDEF | 2201 | 103.997 |
| 926 | AGTACTACTAATGTTGCGTAT | 985 | STTNVAY | 2202 | 103.987 |
| 927 | AGGATGTCGGATCCTAGTGAT | 986 | RMSDPSD | 2203 | 103.981 |
| 928 | AGTCTGTCTATTACTTCGGCG | 987 | SLSITSA | 2204 | 103.963 |
| 929 | GAAAGTGCCACATCTCTAAAA | 988 | ESATSLK | 2205 | 103.954 |
| 930 | TACACTGACGGAAGAAACACC | 989 | YTDGRNT | 2206 | 103.949 |
| 931 | TCCATATCCAACCTGCGTACC | 990 | SISNLRT | 2207 | 103.935 |
| 932 | CAAAACGACAAATCTGACAAC | 991 | QNDKSDN | 2208 | 103.9165 |
| 933 | GGTGGAACAGGTCTTTCCAAA | 992 | GGTGLSK | 2209 | 103.916 |
| 934 | AGTCAGGCTCAGATTCGTGTT | 993 | SQAQIRV | 2210 | 103.915 |
| 935 | GGTTTGATGGCGCATGTGACT | 994 | GLMAHVT | 2211 | 103.877 |
| 936 | CTGGTTGTTTCGAATAGTCTG | 995 | LVVSNSL | 2212 | 103.865 |
| 937 | CATGATTCTGTGAATACGGCG | 996 | HDSVNTA | 2213 | 103.8588 |
| 938 | ACTCTTGCGAAGGATGGGAAT | 997 | TLAKDGN | 2214 | 103.842 |
| 939 | TCCGACGGATCGAAACTACTA | 998 | SDGSKLL | 2215 | 103.829 |
| 940 | ATAGACAAAACGTTCTCGGTC | 999 | IDKTFSV | 2216 | 103.812 |
| 941 | CGGCTGGTTAACATCGACCAC | 1000 | RLVNIDH | 2217 | 103.8026 |
| 942 | AAAAACTACGACAGTGACTCA | 1001 | KNYDSDS | 2218 | 103.794 |
| 943 | AGTACGCAGAGTACTAATCCG | 1002 | STQSTNP | 2219 | 103.7868 |
| 944 | CAAATATCACTACAACTCGGC | 1003 | QISLQLG | 2220 | 103.77 |
| 945 | TCCGAACCCCTTAGAGTTGGA | 1004 | SEPLRVG | 2221 | 103.749 |
| 946 | AGTCGTCTGCAGACTCAGCAG | 1005 | SRLQTQQ | 2222 | 103.7406 |
| 947 | GAAGGTTCACAAGGAAACCAC | 1006 | EGSQGNH | 2223 | 103.739 |
| 948 | CGTTCTGACCTTACTGAAAGT | 1007 | RSDLTES | 2224 | 103.736 |
| 949 | CATACTGGTGTTCAGACTAAT | 1008 | HTGVQTN | 2225 | 103.724 |
| 950 | GAGTTGGATCATCTTTCGCAT | 1009 | ELDHLSH | 2226 | 103.714 |
| 951 | GTTACTGGTGTTGATTATGCG | 1010 | VTGVDYA | 2227 | 103.713 |
| 952 | GGCGGCGCACACACTCGTGTA | 1011 | GGAHTRV | 2228 | 103.676 |
| 953 | GCCTACGGTATACACGAAGTG | 1012 | AYGIHEV | 2229 | 103.653 |
| 954 | GCGATGCTGCGTATGGAGCAG | 1013 | AMLRMEQ | 2230 | 103.652 |
| 955 | AGGCAGGCGAATCAGACGTAT | 1014 | RQANQTY | 2231 | 103.652 |
| 956 | TTTTCTGGTCAGGCGTTGGCT | 1015 | FSGQALA | 2232 | 103.646 |
| 957 | GATAATGTGAATTCTCAGCCT | 1016 | DNVNSQP | 2233 | 103.646 |
| 958 | GGGTTGCATGGGACGAGTAAT | 1017 | GLHGTSN | 2234 | 103.633 |
| 959 | GAGAGGGAGCCTCCTAAGAAT | 1018 | EREPPKN | 2235 | 103.621 |
| 960 | GTGGTGACGCTTGGGATGCTG | 1019 | VVTLGML | 2236 | 103.619 |
| 961 | CATAATAATAATTTGCTGAAT | 1020 | HNNNLLN | 2237 | 103.612 |
| 962 | TTGATTAATATGAGTCAGAAT | 1021 | LINMSQN | 2238 | 103.6 |
| 963 | AATACTAATGCGTCGTATTCT | 1022 | NTNASYS | 2239 | 103.599 |
| 964 | AGGCTTAATGCGGGTGAGCAT | 1023 | RLNAGEH | 2240 | 103.594 |
| 965 | GCTGTTATTCTGAATCCTGTT | 1024 | AVILNPV | 2241 | 103.576 |
| 966 | CCGAGTACTCATGGGTATGTT | 1025 | PSTHGYV | 2242 | 103.571 |
| 967 | CTTAGGGCGTCTGTGTCGGAG | 1026 | LRASVSE | 2243 | 103.564 |
| 968 | ATGATGACCTCTATGACGTTA | 1027 | MMTSMTL | 2244 | 103.561 |
| 969 | TCGGCACACAACATAGTATAC | 1028 | SAHNIVY | 2245 | 103.556 |
| 970 | CACGACAGCACAACCCGCCCA | 1029 | HDSTTRP | 2246 | 103.545 |
| 971 | ATCAAAGACTCGTACCTTACT | 1030 | IKDSYLT | 2247 | 103.542 |
| 972 | TATACGCCTGGGCTTACTGAG | 1031 | YTPGLTE | 2248 | 103.541 |
| 973 | AAGATGGGTGGTTCTCAGAGT | 1032 | KMGGSQS | 2249 | 103.477 |
| 974 | TCACGTCAAACAGCGCTAACA | 1033 | SRQTALT | 2250 | 103.4599 |
| 975 | GTAGAAACCAGCAGATTGTAC | 1034 | VETSRLY | 2251 | 103.45 |
| 976 | AAATCCAACAACGGGGAATAC | 1035 | KSNNGEY | 2252 | 103.424 |
| 977 | TCGGGTGTTCATAGTGCGCGT | 1036 | SGVHSAR | 2253 | 103.3881 |
| 978 | CCTAACAACGAAAAAAACCCG | 1037 | PNNEKNP | 2254 | 103.326 |
| 979 | ACTATTGGTGAGGGGTATCAT | 1038 | TIGEGYH | 2255 | 103.325 |
| 980 | CTGCAGACTTCTGTTGCTACT | 1039 | LQTSVAT | 2256 | 103.316 |
| 981 | CTATTGGGAAACGCACCCACA | 1040 | LLGNAPT | 2257 | 103.308 |
| 982 | ATTTCGGGGTCTCATTTGAAT | 1041 | ISGSHLN | 2258 | 103.297 |
| 983 | AAGTCTCTTAGTAGTGATGAT | 1042 | KSLSSDD | 2259 | 103.285 |
| 984 | ACGAGGACTCAGGGGACGTCT | 1043 | TRTQGTS | 2260 | 103.2635 |
| 985 | GTTAGTAGGTCTGGGAGTACT | 1044 | VSRSGST | 2261 | 103.257 |
| 986 | AGCGCCGACACCCGGTCCCCC | 1045 | SADTRSP | 2262 | 103.242 |
| 987 | CGTGATACTGCTAATGGGCCG | 1046 | RDTANGP | 2263 | 103.2389 |
| 988 | ATGATGTCTAACAGCCTCGCG | 1047 | MMSNSLA | 2264 | 103.232 |
| 989 | ACTGGGAGGATTGAGCTTAGG | 1048 | TGRIELR | 2265 | 103.214 |
| 990 | GCTAATAATGCGGCTGCGTCG | 1049 | ANNAAAS | 2266 | 103.209 |
| 991 | CAGTTGAATATTAATGATAAG | 1050 | QLNINDK | 2267 | 103.208 |
| 992 | ATGGACGGGGCTCACACGTCA | 1051 | MDGAHTS | 2268 | 103.202 |
| 993 | ACTAGTGCGACTGATTCGATG | 1052 | TSATDSM | 2269 | 103.197 |
| 994 | GCCGCCAGCTTGTCGCAAAGC | 1053 | AASLSQS | 2270 | 103.152 |
| 995 | TCTCAGGCGGGTCTGCTTGTG | 1054 | SQAGLLV | 2271 | 103.116 |
| 996 | ACGACTTATTCGGATCTGAGT | 1055 | TTYSDLS | 2272 | 103.104 |
| 997 | TTCTCCTCCGGAACAACCATA | 1056 | FSSGTTI | 2273 | 103.102 |
| 998 | GTCTTCACAGAAATAGAATCG | 1057 | VFTEIES | 2274 | 103.101 |
| 999 | GCAGACCCCGCTAAAGGCAAA | 1058 | ADPAKGK | 2275 | 103.083 |
| 1000 | AAAGAATCTGAATACAGAGTT | 1059 | KESEYRV | 2276 | 103.07 |
| 1001 | GGGATGGTGTCTCTTAATAGG | 1060 | GMVSLNR | 2277 | 103.06 |
| 1002 | ACCGTTATCGAACGCAAAGAC | 1061 | TVIERKD | 2278 | 103.0575 |
| 1003 | AGGATTGATACGTTGTTGGTG | 1062 | RIDTLLV | 2279 | 103.055 |
| 1004 | GGATCCACAGGCCTACCCCCG | 1063 | GSTGLPP | 2280 | 103.047 |
| 1005 | ATGGAGTTGACTTCTACTAGT | 1064 | MELTSTS | 2281 | 103.026 |
| 1006 | CAACCAGGAGCCCCCCAAACC | 1065 | QPGAPQT | 2282 | 103.014 |
| 1007 | AATTCGATGGGTAATGGGGGT | 1066 | NSMGNGG | 2283 | 103.009 |
| 1008 | GGTAGTACTAAGTCTGGGCAG | 1067 | GSTKSGQ | 2284 | 103.0049 |
| 1009 | ACTTTTTTGCCTCAGCTTGGG | 1068 | TFLPQLG | 2285 | 102.994 |
| 1010 | ATGGGAATAAACGTACTGAGC | 1069 | MGINVLS | 2286 | 102.986 |
| 1011 | GTGAATCTTGGTATTTCGGGG | 1070 | VNLGISG | 2287 | 102.985 |
| 1012 | AGTGAGAATCGGGCTGGTAAT | 1071 | SENRAGN | 2288 | 102.945 |
| 1013 | CACTCCAACGCGACTACGATA | 1072 | HSNATTI | 2289 | 102.916 |
| 1014 | CCGGGGTCGTCCGCTTCCATC | 1073 | PGSSASI | 2290 | 102.914 |
| 1015 | ATTACGTCGTTGAATGGGATG | 1074 | ITSLNGM | 2291 | 102.909 |
| 1016 | TATCTGGAGGGTGCTCATCGT | 1075 | YLEGAHR | 2292 | 102.896 |
| 1017 | AGGCAGGTTGAGCAGTCTGAT | 1076 | RQVEQSD | 2293 | 102.889 |
| 1018 | AGCTCTCAAAGTTCCGGGTCG | 1077 | SSQSSGS | 2294 | 102.8836 |
| 1019 | CAGCTTACTGTTGGGAAGCCG | 1078 | QLTVGKP | 2295 | 102.8762 |
| 1020 | GTTGTGCATTCGAGTATTACT | 1079 | VVHSSIT | 2296 | 102.8257 |
| 1021 | CTAGAACAACTACGGGTCCCA | 1080 | LEQLRVP | 2297 | 102.815 |
| 1022 | CAGCATTCTCCGAAGCCGGTT | 1081 | QHSPKPV | 2298 | 102.81 |
| 1023 | GCGGGCAGTTCGCCATCACGC | 1082 | AGSSPSR | 2299 | 102.8035 |
| 1024 | GGAGTAACAATCGGTAGCAGG | 1083 | GVTIGSR | 2300 | 102.7752 |
| 1025 | TACATCGCGGGAGGCGACCAA | 1084 | YIAGGDQ | 2301 | 102.75 |
| 1026 | ATTAGTAGTGAGAGGTTTTCT | 1085 | ISSERFS | 2302 | 102.729 |
| 1027 | AGGAGTGAGGGTAATCATGCT | 1086 | RSEGNHA | 2303 | 102.719 |
| 1028 | GAGAAGGGGAATAGTGGGGTT | 1087 | EKGNSGV | 2304 | 102.71 |
| 1029 | TACATAGTTGACCACGCTAAC | 1088 | YIVDHAN | 2305 | 102.71 |
| 1030 | CGTCGGTTGAGTACGGATCTT | 1089 | RRLSTDL | 2306 | 102.702 |
| 1031 | GCGAATAGTAGGCTTGGGGCG | 1090 | ANSRLGA | 2307 | 102.6979 |
| 1032 | GGTACTGCTGAGAATACGAGT | 1091 | GTAENTS | 2308 | 102.696 |
| 1033 | GTGAGGGATGTTGCTAAGGAG | 1092 | VRDVAKE | 2309 | 102.691 |
| 1034 | GGAGGCCTTACCAACGGTCTA | 1093 | GGLTNGL | 2310 | 102.67 |
| 1035 | CCTTCGATTCCGTCGTTTTCG | 1094 | PSIPSFS | 2311 | 102.657 |
| 1036 | AACGCTCTCCTCAACGCACCT | 1095 | NALLNAP | 2312 | 102.628 |
| 1037 | GACGACATGGTCAAAAACTCA | 1096 | DDMVKNS | 2313 | 102.623 |
| 1038 | ACTGCGAATACGCATGCTCTG | 1097 | TANTHAL | 2314 | 102.613 |
| 1039 | GTATACGCCACCGCACTCGCA | 1098 | VYATALA | 2315 | 102.611 |
| 1040 | GGTATATACCCGGCATCCACC | 1099 | GIYPAST | 2316 | 102.61 |
| 1041 | GGTTTTGATGGTAAGCAGCTT | 1100 | GFDGKQL | 2317 | 102.606 |
| 1042 | CACTCTATGTCCGCAAACACC | 1101 | HSMSANT | 2318 | 102.605 |
| 1043 | TGGAGCATCAAAAACCAAACA | 1102 | WSIKNQT | 2319 | 102.586 |
| 1044 | ACCCTCCACACCAAAGACCTA | 1103 | TLHTKDL | 2320 | 102.57 |
| 1045 | TCTTATGGTAATACTCATGAT | 1104 | SYGNTHD | 2321 | 102.566 |
| 1046 | CAGTCGGGGTCTCTGGTGCCG | 1105 | QSGSLVP | 2322 | 102.552 |
| 1047 | AATACTTTGCAGAATAGTCAT | 1106 | NTLQNSH | 2323 | 102.5506 |
| 1048 | ACGGCTGAGTCTAGTCATCCG | 1107 | TAESSHP | 2324 | 102.548 |
| 1049 | GCCTCTACAGTCTCACTCTAC | 1108 | ASTVSLY | 2325 | 102.547 |
| 1050 | CTGACTGCTGTTGCGATTAGT | 1109 | LTAVAIS | 2326 | 102.542 |
| 1051 | GTCTCGGGACAAAGTGCGTAC | 1110 | VSGQSAY | 2327 | 102.541 |
| 1052 | GGTGAAACTAACTTCCCAACT | 1111 | GETNFPT | 2328 | 102.532 |
| 1053 | AATGATAATAGGTCGATGAAT | 1112 | NDNRSMN | 2329 | 102.526 |
| 1054 | CGATCAGGCGACCCTAAAAAC | 1113 | RSGDPKN | 2330 | 102.519 |
| 1055 | TGGGAGAGTGATAAGTTTCGT | 1114 | WESDKFR | 2331 | 102.514 |
| 1056 | CAGGTTAATCATAATACTAGT | 1115 | QVNHNTS | 2332 | 102.514 |
| 1057 | GGGTGGTCGAACAACGAACTA | 1116 | GWSNNEL | 2333 | 102.507 |
| 1058 | CGGGCTGTGCTTGCGACTAAT | 1117 | RAVLATN | 2334 | 102.49 |
| 1059 | CATATGGGTTTGAATGAGCTT | 1118 | HMGLNEL | 2335 | 102.484 |
| 1060 | GGAGAAAGCTCCTCAATAAGC | 1119 | GESSSIS | 2336 | 102.477 |
| 1061 | ATACACAAATCTAGCGTCGAA | 1120 | IHKSSVE | 2337 | 102.473 |
| 1062 | ATGTCCGGATCCATGATATCA | 1121 | MSGSMIS | 2338 | 102.463 |
| 1063 | TTGAGTCTGGCTGGGAATAGG | 1122 | LSLAGNR | 2339 | 102.448 |
| 1064 | TCTGCAACAACGAACCACGGA | 1123 | SATTNHG | 2340 | 102.441 |
| 1065 | TCTACGGAGTCTAATGCTAGT | 1124 | STESNAS | 2341 | 102.43 |
| 1066 | CCGATTGCTGAGAGGCCTTCT | 1125 | PIAERPS | 2342 | 102.428 |
| 1067 | TTACTTCCAAACAACACCCAC | 1126 | LLPNNTH | 2343 | 102.424 |
| 1068 | GGGACTCTTAAGAAGGATGCG | 1127 | GTLKKDA | 2344 | 102.412 |
| 1069 | GCTCTTGAGAATCGGAGTCTG | 1128 | ALENRSL | 2345 | 102.408 |
| 1070 | ACCACCGGGAACTCCACGATG | 1129 | TTGNSTM | 2346 | 102.383 |
| 1071 | GTGTATGATAGTGCGCCTAAT | 1130 | VYDSAPN | 2347 | 102.366 |
| 1072 | CTACTATCTAAAGGGGACTCC | 1131 | LLSKGDS | 2348 | 102.346 |
| 1073 | TCTTACGCCATAAACCAATCA | 1132 | SYAINQS | 2349 | 102.335 |
| 1074 | GGAGGAGGGGAACGTTCCACG | 1133 | GGGERST | 2350 | 102.323 |
| 1075 | ATTCAGGTTAGTGGTAGTCAG | 1134 | IQVSGSQ | 2351 | 102.315 |
| 1076 | TATCCTGTTTCGCTTTCGCCG | 1135 | YPVSLSP | 2352 | 102.312 |
| 1077 | GAGTTGGGTAATAAGACGGCT | 1136 | ELGNKTA | 2353 | 102.311 |
| 1078 | TCGGGGGTAAACTTCGGAGTA | 1137 | SGVNFGV | 2354 | 102.287 |
| 1079 | GCGTGGAGTTCGCCGAGTGGG | 1138 | AWSSPSG | 2355 | 102.285 |
| 1080 | GGTGTGAATTATCATACTACG | 1139 | GVNYHTT | 2356 | 102.261 |
| 1081 | CTGATTGGGGAGCTTAAGATG | 1140 | LIGELKM | 2357 | 102.255 |
| 1082 | TATCTGAATAGTAAGCAGCTT | 1141 | YLNSKQL | 2358 | 102.212 |
| 1083 | ACTGTTGATAGGCCGATTGTG | 1142 | TVDRPIV | 2359 | 102.191 |
| 1084 | GTCAGCAAAACCAAAGACTCG | 1143 | VSKTKDS | 2360 | 102.184 |
| 1085 | CAAGCTGGGAACGCGCCAAGG | 1144 | QAGNAPR | 2361 | 102.1806 |
| 1086 | CAAGACCAAACGAGCAACCGT | 1145 | QDQTSNR | 2362 | 102.177 |
| 1087 | GATACTACGTATCGGAATACT | 1146 | DTTYRNT | 2363 | 102.173 |
| 1088 | GGGACAACCGAAGTTAACAAA | 1147 | GTTEVNK | 2364 | 102.17 |
| 1089 | GGGTTTACTAATACGAGTAAG | 1148 | GFTNTSK | 2365 | 102.152 |
| 1090 | GTGCAGAAGAATGATGTGCTT | 1149 | VQKNDVL | 2366 | 102.14 |
| 1091 | AGCGTCAACAACATGCGACTC | 1150 | SVNNMRL | 2367 | 102.1324 |
| 1092 | TTCAGTGCCGCCTTACCGTTA | 1151 | FSAALPL | 2368 | 102.13 |
| 1093 | GACGTCCCAAACAACAAAAGG | 1152 | DVPNNKR | 2369 | 102.126 |
| 1094 | GGTGAGACTATGCGTCATAAT | 1153 | GETMRHN | 2370 | 102.119 |
| 1095 | ATTCGGACTTCTGTGATTAAT | 1154 | IRTSVIN | 2371 | 102.103 |
| 1096 | CCGCGTGCTCCTGGTCATAAT | 1155 | PRAPGHN | 2372 | 102.101 |
| 1097 | AGTGTTGCGCATCCTTTGTCT | 1156 | SVAHPLS | 2373 | 102.101 |
| 1098 | ATGACAATAACCGTCGAACCG | 1157 | MTITVEP | 2374 | 102.096 |
| 1099 | CCATTAAACGCGAACGGCTCC | 1158 | PLNANGS | 2375 | 102.094 |
| 1100 | AATAGGCAGCGGGATTTTGAG | 1159 | NRQRDFE | 2376 | 102.073 |
| 1101 | GATATTCATAATCCGCGTACG | 1160 | DIHNPRT | 2377 | 102.073 |
| 1102 | TGGATAGCAGGAAACCACTCC | 1161 | WIAGNHS | 2378 | 102.07 |
| 1103 | TCTACTCATCATGCTGATCGT | 1162 | STHHADR | 2379 | 102.069 |
| 1104 | CCGGAATCCGCCGCCAAAAGC | 1163 | PESAAKS | 2380 | 102.058 |
| 1105 | CACTCCGACAAAGTCTCCTCA | 1164 | HSDKVSS | 2381 | 102.051 |
| 1106 | TCAAACAGCGCCGACGCGGGG | 1165 | SNSADAG | 2382 | 102.047 |
| 1107 | GAGTTTCAGAGGATTCGTGAG | 1166 | EFQRIRE | 2383 | 102.039 |
| 1108 | TCCGCGGGGATGACATTGGAC | 1167 | SAGMTLD | 2384 | 102.016 |
| 1109 | ACTCAAACTTCTACCTGGACC | 1168 | TQTSTWT | 2385 | 102.009 |
| 1110 | ACGACACTAACGCAAACGGAC | 1169 | TTLTQTD | 2386 | 102.003 |
| 1111 | GCCTCGAAAGGCTTCGGCCAC | 1170 | ASKGFGH | 2387 | 101.991 |
| 1112 | CCGGCTACGATGATTAGTGAG | 1171 | PATMISE | 2388 | 101.985 |
| 1113 | ACTGACTCATCTGCAGACTCC | 1172 | TDSSADS | 2389 | 101.981 |
| 1114 | TCAACCAGAAAAGAACACGAC | 1173 | STRKEHD | 2390 | 101.98 |
| 1115 | GGTGATATTTCTTATAGGGTT | 1174 | GDISYRV | 2391 | 101.977 |
| 1116 | ATGGGGTATGTTGATAGTCTG | 1175 | MGYVDSL | 2392 | 101.953 |
| 1117 | CAAACCATCACCTCACAAATG | 1176 | QTITSQM | 2393 | 101.941 |
| 1118 | TCGATTGGGTATTCGCCTCCG | 1177 | SIGYSPP | 2394 | 101.939 |
| 1119 | TCATCCCCAGACTCGTACAGA | 1178 | SSPDSYR | 2395 | 101.921 |
| 1120 | ATTAGTCCGAGTGCTTCTAAT | 1179 | ISPSASN | 2396 | 101.855 |
| 1121 | TATCCGGCTGATCATCGGACT | 1180 | YPADHRT | 2397 | 101.85 |
| 1122 | CACACCGGCCAAACACCATCA | 1181 | HTGQTPS | 2398 | 101.837 |
| 1123 | CAGACGACTATTCTGGCTGCT | 1182 | QTTILAA | 2399 | 101.837 |
| 1124 | GATGGTACGAGGCAGGTTCAT | 1183 | DGTRQVH | 2400 | 101.836 |
| 1125 | AGGAGTAGTCCTGCGACGAAT | 1184 | RSSPATN | 2401 | 101.829 |
| 1126 | GCGATGAGTCATACGTATAAG | 1185 | AMSHTYK | 2402 | 101.813 |
| 1127 | ATGGCGGCTCCGCCGGAGCAT | 1186 | MAAPPEH | 2403 | 101.802 |
| 1128 | GGTCCTAGTACTTCGGAGGCG | 1187 | GPSTSEA | 2404 | 101.794 |
| 1129 | CATAATCATGATAGGTCGTCT | 1188 | HNHDRSS | 2405 | 101.7829 |
| 1130 | GTGGTCCCATCGACCCAAGCA | 1189 | VVPSTQA | 2406 | 101.781 |
| 1131 | ATTCCTGTGACTACTCGTAAT | 1190 | IPVTTRN | 2407 | 101.722 |
| 1132 | AACCAACTCGTACGCGGGACA | 1191 | NQLVRGT | 2408 | 101.717 |
| 1133 | GGGTTTGCGCTTACGGGTACG | 1192 | GFALTGT | 2409 | 101.696 |
| 1134 | TCTAAGGGTGGTGATATGGTG | 1193 | SKGGDMV | 2410 | 101.666 |
| 1135 | GCTCGACCAGGCCAATCTATG | 1194 | ARPGQSM | 2411 | 101.6287 |
| 1136 | AAAGCAGACTACGAATCCTCC | 1195 | KADYESS | 2412 | 101.626 |
| 1137 | GGACCAAGTTCGCACATCGTT | 1196 | GPSSHIV | 2413 | 101.616 |
| 1138 | GAAGTTGTCAAAACCACGCAC | 1197 | EVVKTTH | 2414 | 101.61 |
| 1139 | ACTTTGGATAATAATCATTCT | 1198 | TLDNNHS | 2415 | 101.604 |
| 1140 | ACGATTTATAATATGGGTCCG | 1199 | TIYNMGP | 2416 | 101.599 |
| 1141 | TCTACCATGAACACGATCACG | 1200 | STMNTIT | 2417 | 101.597 |
| 1142 | ACGCTGGCGCGGACTACTGAG | 1201 | TLARTTE | 2418 | 101.581 |
| 1143 | TTGATTTCTTCGCAGACTTCT | 1202 | LISSQTS | 2419 | 101.553 |
| 1144 | CAGACTGCGTCTGGTGATACT | 1203 | QTASGDT | 2420 | 101.497 |
| 1145 | GCGCATGGTGCTTTTCCGGTT | 1204 | AHGAFPV | 2421 | 101.495 |
| 1146 | GGGGAGACGCGGTCGACTGCT | 1205 | GETRSTA | 2422 | 101.494 |
| 1147 | AACAACTACGCCTACTCCGCT | 1206 | NNYAYSA | 2423 | 101.493 |
| 1148 | GAGGCTTATCAGACTGAGAAG | 1207 | EAYQTEK | 2424 | 101.49 |
| 1149 | TCTCTAGCACACGCCGTAAGC | 1208 | SLAHAVS | 2425 | 101.485 |
| 1150 | ACGTATCAGTTGAGTGGGAAT | 1209 | TYQLSGN | 2426 | 101.452 |
| 1151 | ATGAGCGAAAGGTTGCGGATA | 1210 | MSERLRI | 2427 | 101.431 |
| 1152 | GGGTCGGGGAAAGACCCAGGG | 1211 | GSGKDPG | 2428 | 101.43 |
| 1153 | TACAACAGCAACGCTTCTGTA | 1212 | YNSNASV | 2429 | 101.428 |
| 1154 | ACGAGGGGTGATATGGAGTTT | 1213 | TRGDMEF | 2430 | 101.424 |
| 1155 | GGAATCACCGGAAGCCCCGGC | 1214 | GITGSPG | 2431 | 101.42 |
| 1156 | CAACACACCGCCCACCCCATG | 1215 | QHTAHPM | 2432 | 101.416 |
| 1157 | GATACGGCGAATCGTTCGACT | 1216 | DTANRST | 2433 | 101.407 |
| 1158 | TCGGCACACGACGCAAGACTA | 1217 | SAHDARL | 2434 | 101.387 |
| 1159 | CTTAATCATACTCTGGGGCAT | 1218 | LNHTLGH | 2435 | 101.385 |
| 1160 | GGGTTTGAGACGAGTAGTCCT | 1219 | GFETSSP | 2436 | 101.369 |
| 1161 | GGTACGAGTGCGGAGAGTCGG | 1220 | GTSAESR | 2437 | 101.366 |
| 1162 | CATGCTAATTATGTTGAGGTG | 1221 | HANYVEV | 2438 | 101.345 |
| 1163 | ACAACGAAACCGGTCGCGGAA | 1222 | TTKPVAE | 2439 | 101.338 |
| 1164 | TCGACCGCCGTTACTAACTCA | 1223 | STAVTNS | 2440 | 101.304 |
| 1165 | CTGGGGCTTGCTGGTCAGGTT | 1224 | LGLAGQV | 2441 | 101.304 |
| 1166 | GTGCTTAAGGGTACGTTTCCG | 1225 | VLKGTFP | 2442 | 101.298 |
| 1167 | ATGAATGAGCCTGGTAGGACG | 1226 | MNEPGRT | 2443 | 101.283 |
| 1168 | ACTTCTGATCCTTTGAGGAAT | 1227 | TSDPLRN | 2444 | 101.252 |
| 1169 | CGTGATACTAATACGGATAAG | 1228 | RDTNTDK | 2445 | 101.234 |
| 1170 | GAGTCTGATTTGCGTCAGCGG | 1229 | ESDLRQR | 2446 | 101.225 |
| 1171 | TCCGGAATGGCCGGCCTTTCC | 1230 | SGMAGLS | 2447 | 101.211 |
| 1172 | ATAGCAACAACGTCTGGGCGG | 1231 | IATTSGR | 2448 | 101.21 |
| 1173 | ACGATTAGGAGTGAGGGTTTT | 1232 | TIRSEGF | 2449 | 101.202 |
| 1174 | GGTCTGTCTATTACTATTGCG | 1233 | GLSITIA | 2450 | 101.176 |
| 1175 | CCGCCTACTAATGGGCGTATG | 1234 | PPTNGRM | 2451 | 101.17 |
| 1176 | CTACAAGACCGGGCAACGAAC | 1235 | LQDRATN | 2452 | 101.165 |
| 1177 | CTTAAATCGACCGGTGACCAC | 1236 | LKSTGDH | 2453 | 101.132 |
| 1178 | GATAATAATAATCAGGTTTAT | 1237 | DNNNQVY | 2454 | 101.13 |
| 1179 | GTGCATATGGAGTCGTATGCG | 1238 | VHMESYA | 2455 | 101.111 |
| 1180 | GACCAAATAGGGCACGGAACA | 1239 | DQIGHGT | 2456 | 101.106 |
| 1181 | GGGACGGGGCCGCATGGTACT | 1240 | GTGPHGT | 2457 | 101.0712 |
| 1182 | ATTGGGAATAATACTGGTCTT | 1241 | IGNNTGL | 2458 | 101.0529 |
| 1183 | TTAAACGCAGAATACACCAAC | 1242 | LNAEYTN | 2459 | 101.047 |
| 1184 | GTGACGTCGTCTGCTAGTGGT | 1243 | VTSSASG | 2460 | 101.027 |
| 1185 | ACGCATGTTGCTAAGCCTGAT | 1244 | THVAKPD | 2461 | 101.017 |
| 1186 | CCGATGAACAAAGACATACTG | 1245 | PMNKDIL | 2462 | 100.9906 |
| 1187 | CTTAGTTTGAATATGAATGAG | 1246 | LSLNMNE | 2463 | 100.99 |
| 1188 | GTCGGCAACTCAAGCACTCAC | 1247 | VGNSSTH | 2464 | 100.99 |
| 1189 | GGCCACGGAAGTGACTTGACC | 1248 | GHGSDLT | 2465 | 100.9576 |
| 1190 | CTTACACAAAACCCAACGAAC | 1249 | LTQNPTN | 2466 | 100.934 |
| 1191 | CCGAGTGATCATATGCGGACT | 1250 | PSDHMRT | 2467 | 100.8849 |
| 1192 | CCTGATAGTCGTTTGGCGGCT | 1251 | PDSRLAA | 2468 | 100.843 |
| 1193 | TGGGGTAGTGAGGGGACGATT | 1252 | WGSEGTI | 2469 | 100.84 |
| 1194 | AAACCGACAAACGACTCGTAC | 1253 | KPTNDSY | 2470 | 100.821 |
| 1195 | AACCGCGGAACAGAAGTTTAC | 1254 | NRGTEVY | 2471 | 100.8147 |
| 1196 | CACGTGATCACAACAAAAGAC | 1255 | HVITTKD | 2472 | 100.7896 |
| 1197 | ATTGTGTCTAATCCGCCGGCG | 1256 | IVSNPPA | 2473 | 100.76 |
| 1198 | ATGCGTAACGACCAACAACTT | 1257 | MRNDQQL | 2474 | 100.7503 |
| 1199 | TTTCAGCGTGATGTTGGTCAT | 1258 | FQRDVGH | 2475 | 100.7392 |
| 1200 | GCCAACGACAACACCAAACAA | 1259 | ANDNTKQ | 2476 | 100.7364 |
| 1201 | TCTGTTCCGCATGCGGGGGAT | 1260 | SVPHAGD | 2477 | 100.7276 |
| 1202 | AATGCTACTCCGCCGAATCAT | 1261 | NATPPNH | 2478 | 100.6678 |
| 1203 | TCAGAACACACATCAGTTCTA | 1262 | SEHTSVL | 2479 | 100.64 |
| 1204 | GCCATGTCCCAAACGGACATC | 1263 | AMSQTDI | 2480 | 100.628 |
| 1205 | CCTAAGGCTCCGCTTAATAAT | 1264 | PKAPLNN | 2481 | 100.627 |
| 1206 | ACCAACAACTTACTCGCACAA | 1265 | TNNLLAQ | 2482 | 100.55 |
| 1207 | CAGCGTCAGGGTTCGGGGGTT | 1266 | QRQGSGV | 2483 | 100.5318 |
| 1208 | CGCAGTGACACCACTAACGCC | 1267 | RSDTTNA | 2484 | 100.51 |
| 1209 | GAGGCTGATAAGAATGGTGTT | 1268 | EADKNGV | 2485 | 100.386 |
| 1210 | ATGCTGGGGGGTTTTGCGCAG | 1269 | MLGGFAQ | 2486 | 100.3622 |
| 1211 | ATGACACACCTCAGCACAGAC | 1270 | MTHLSTD | 2487 | 100.267 |
| 1212 | GTTTTGTCTGATAAGGCGTTT | 1271 | VLSDKAF | 2488 | 100.231 |
| 1213 | ACACCCTCCGGTACCATAAAA | 1272 | TPSGTIK | 2489 | 100.22 |
| 1214 | ATTATTCTTATGGGTCAGAGT | 1273 | IILMGQS | 2490 | 100.213 |
| 1215 | CTTTCGGGGGGTGAGACTCTT | 1274 | LSGGETL | 2491 | 100.154 |
| 1216 | ACCGACGGCGCCCTGGGTTAC | 1275 | TDGALGY | 2492 | 100.129 |
| 1217 | GGGAATAAGGCTGCGCTGACG | 1276 | GNKAALT | 2493 | 100.066 |

TABLE 2
MHCK7 Results mRNA Second Round of Capsid Variant
Selection in C57BL6 mice-score capped at 100

| Variant | | SEQ | | SEQ | Sum of muscle mRNA |
|---|---|---|---|---|---|
| ID | Nucleotide Sequence | ID NO: | aa | ID NO: | score_capped at 100 |
| 1 | AGAGGAGACTTGACAACCCCA | 2494 | RGDLTTP | 3737 | 576.12 |
| 2 | CGGGGTGATCTTAATCAGTAT | 2495 | RGDLNQY | 3738 | 496.41 |
| 3 | AGGGGTGATCTTTCTACGCCT | 2496 | RGDLSTP | 3739 | 475.909 |
| 4 | CGGGGTGATCAGCTTTATCAT | 2497 | RGDQLYH | 3740 | 460.578 |
| 5 | CGAGGAGACACCATGAGCAAA | 2498 | RGDTMSK | 3741 | 439.771 |
| 6 | AGGGGGGATGCGACGGAGCTT | 2499 | RGDATEL | 3742 | 429.74 |
| 7 | AGAGGCGACTTATCCACACCC | 2500 | RGDLSTP | 3743 | 429.182 |
| 8 | CGCGGCGACATGATAAACACC | 2501 | RGDMINT | 3744 | 397.62 |
| 9 | AGGGGCGACCTGAACCAATAC | 2502 | RGDLNQY | 3745 | 388.417 |
| 10 | CGGGGGGATACTATGTCTAAG | 2503 | RGDTMSK | 3746 | 352.268 |
| 11 | CGGGGTGATCTTACTACGCCT | 2504 | RGDLTTP | 3747 | 320.042 |
| 12 | AGGGGCGACCTCAACGACAGC | 2505 | RGDLNDS | 3748 | 315.615 |
| 13 | GCAAACCCCAACATACTAGAC | 2506 | ANPNILD | 3749 | 302.02 |
| 14 | CGAGGCGACACAATGAACTAC | 2507 | RGDTMNY | 3750 | 285.332 |
| 15 | ATGAGTAATTTGGGGTATGAG | 2508 | MSNLGYE | 3751 | 270.74 |
| 16 | TACACCTCTCAAACCAGCACT | 2509 | YTSQTST | 3752 | 256.544 |
| 17 | CTCGGAGGAAACAGCAGGTTC | 2510 | LGGNSRF | 3753 | 255.425 |
| 18 | CAAAGCCAAGCGATACAACTA | 2511 | QSQAIQL | 3754 | 254.191 |
| 19 | AACACGTACACACCGGGAAAA | 2512 | NTYTPGK | 3755 | 239.565 |
| 20 | GGGGCGGAAGCGGGCCGCCAA | 2513 | GAEAGRQ | 3756 | 237.2829 |
| 21 | GAACACGCTACAGCAAAACAA | 2514 | EHATAKQ | 3757 | 236.826 |
| 22 | GCGGCACAACTCGTCAGTCCA | 2515 | AAQLVSP | 3758 | 225.034 |
| 23 | GATCAGACGGCTAGTATTGTT | 2516 | DQTASIV | 3759 | 224.832 |
| 24 | GTTCAAACCCACATAGGAGTC | 2517 | VQTHIGV | 3760 | 224.306 |
| 25 | TCTTATGGTAATACTCATGAT | 2518 | SYGNTHD | 3761 | 224.26 |
| 26 | ACCTCCACGGCTTCAAAACAA | 2519 | TSTASKQ | 3762 | 221.617 |
| 27 | TTGGTGACTCATGAGCGGATT | 2520 | LVTHERI | 3763 | 219.227 |
| 28 | ATGGATAAGTCTAATAATTCT | 2521 | MDKSNNS | 3764 | 216.638 |
| 29 | CGTGGTGATATGTCTCGTGAG | 2522 | RGDMSRE | 3765 | 214.708 |
| 30 | CGCGGTGACGTGGCAGAAATA | 2523 | RGDVAEI | 3766 | 212.967 |
| 31 | GGTGGCGAAAACAGAACCCCA | 2524 | GGENRTP | 3767 | 210.4 |
| 32 | GCTGGGCATCAGCAGCTTGCT | 2525 | AGHQQLA | 3768 | 210.1746 |
| 33 | CGTCTTAATAGTAGTATGAAT | 2526 | RLNSSMN | 3769 | 209.449 |
| 34 | TATTATGAGAAGCTTAGTGCG | 2527 | YYEKLSA | 3770 | 209.263 |
| 35 | GAAGCGTCCAACTACGAACGA | 2528 | EASNYER | 3771 | 209.09 |
| 36 | TTCCAAACTGACACGCACCGA | 2529 | FQTDTHR | 3772 | 208.95 |
| 37 | AACAGTTCCCAATGGCCCAAC | 2530 | NSSQWPN | 3773 | 208.638 |
| 38 | GATGGTAAGACTACGTCTAAT | 2531 | DGKTTSN | 3774 | 207.638 |
| 39 | GCTGTGCATGCGACTAGTAGT | 2532 | AVHATSS | 3775 | 205.952 |
| 40 | AAAACACTCCCCGGCAGGGAA | 2533 | KTLPGRE | 3776 | 205.926 |
| 41 | ATACTGAAATCCGACGCACCA | 2534 | ILKSDAP | 3777 | 204.523 |
| 42 | AGTACGAATGAGGCTCCTAAG | 2535 | STNEAPK | 3778 | 204.522 |
| 43 | TTTGATAGTGCGAATGGTCGG | 2536 | FDSANGR | 3779 | 203.996 |
| 44 | ATGGACGCTGCGTACGGTAGT | 2537 | MDAAYGS | 3780 | 203.401 |
| 45 | AACAAAGACCACAACCACCTG | 2538 | NKDHNHL | 3781 | 202.878 |
| 46 | GGTCAGTATAGTCAGACGCTT | 2539 | GQYSQTL | 3782 | 202.553 |
| 47 | GAAGCATTCCCGCGAGCGGGC | 2540 | EAFPRAG | 3783 | 202.275 |
| 48 | GAACACACTCACTTAAACCCG | 2541 | EHTHLNP | 3784 | 201.959 |
| 49 | ATGCAACGCGAAGACGCGAAC | 2542 | MQREDAN | 3785 | 201.523 |
| 50 | CTAACCGGCTCTGACATGAAA | 2543 | LTGSDMK | 3786 | 200.376 |
| 51 | CGAGTAAACAACGACGCAATA | 2544 | RVNNDAI | 3787 | 200 |
| 52 | CGTGGTGACCAAGGCACACAC | 2545 | RGDQGTH | 3788 | 200 |
| 53 | ATTAATATTAGTAGTGATTTT | 2546 | INISSDF | 3789 | 200 |
| 54 | AATAATGATAATGGTTTTGTT | 2547 | NNDNGFV | 3790 | 200 |
| 55 | TTCATCGCTAACACTAACCCA | 2548 | FIANTNP | 3791 | 200 |
| 56 | GGACTGCACGGCACCAACGCA | 2549 | GLHGTNA | 3792 | 200 |
| 57 | AAAACCATCGACATAGCACAA | 2550 | KTIDIAQ | 3793 | 200 |
| 58 | TCGAGTGATTCTCGTATTCCG | 2551 | SSDSRIP | 3794 | 200 |
| 59 | TCTACATCTCCGGTTAACAGC | 2552 | STSPVNS | 3795 | 200 |
| 60 | GCCAGCATGCCCTCTGTAGAC | 2553 | ASMPSVD | 3796 | 200 |
| 61 | GGTCATAATATGGCACAGGCG | 2554 | GHNMAQA | 3797 | 200 |
| 62 | CACAACAAACCAAACGGAGAC | 2555 | HNKPNGD | 3798 | 197.851 |
| 63 | TACAGGATGGAAACGAACCCA | 2556 | YRMETNP | 3799 | 197.46 |
| 64 | CTTGGGAATGTGGTTCATCCG | 2557 | LGNVVHP | 3800 | 197.383 |
| 65 | GTAACGGCACACCAATTATCC | 2558 | VTAHQLS | 3801 | 196.095 |
| 66 | ACTATGGTAGAAGTACTGCCA | 2559 | TMVEVLP | 3802 | 195.586 |
| 67 | ATCAAAGGGTCTGGGTCGCAA | 2560 | IKGSGSQ | 3803 | 195.296 |
| 68 | ACTAATGGGGGGTCGCTTAAT | 2561 | TNGGSLN | 3804 | 193.959 |
| 69 | CTCGGAGGAAACAGCAGGATC | 2562 | LGGNSRI | 3805 | 193.21 |
| 70 | AGGGGTGATGCGGCGAATAAG | 2563 | RGDAANK | 3806 | 193.16 |
| 71 | GCGTTAAACGCCCAAGGGATC | 2564 | ALNAQGI | 3807 | 192.986 |
| 72 | GCTGAGCATGCGACTAGTAGT | 2565 | AEHATSS | 3808 | 192.59 |
| 73 | TACTTGACCACCGGTACTGCC | 2566 | YLTTGTA | 3809 | 191.521 |
| 74 | GCGGAGGCTCAGACGCGTGTG | 2567 | AEAQTRV | 3810 | 189.899 |
| 75 | GCTGAGCAGGGGCTGTCTTCG | 2568 | AEQGLSS | 3811 | 188.94 |
| 76 | CTGATTGTTACTCAGCATGTG | 2569 | LIVTQHV | 3812 | 188.588 |
| 77 | TCTAGTTATCAGTCTGGGCTG | 2570 | SSYQSGL | 3813 | 188.4 |
| 78 | GCTACGGTTTATAATGAGTTG | 2571 | ATVYNEL | 3814 | 188.18 |
| 79 | CATGATACGGTTGGGGAGAGG | 2572 | HDTVGER | 3815 | 187.269 |
| 80 | CGTGGGGATTTGAATGATTCT | 2573 | RGDLNDS | 3816 | 187.25 |
| 81 | CATGATATTAGTCTGGATCGT | 2574 | HDISLDR | 3817 | 186.65 |
| 82 | ACAGAACAATCTTACTCACGA | 2575 | TEQSYSR | 3818 | 186.237 |
| 83 | TGGTGAGGGGCTGAGTTTGCC | 2576 | W*GAEFA | 3819 | 186.1 |
| 84 | GCTGTGCATGCGACTAGTAGA | 2577 | AVHATSR | 3820 | 185.9 |
| 85 | ATTGAGAGTAAGACTGTGCAG | 2578 | IESKTVQ | 3821 | 185.818 |
| 86 | ACGAATGTTAGTACGCTTTTG | 2579 | TNVSTLL | 3822 | 184.365 |
| 87 | CCACCCAACGGCAGCAGTAGA | 2580 | PPNGSSR | 3823 | 183.258 |
| 88 | CCCTCTACACACGGCTACGTA | 2581 | PSTHGYV | 3824 | 183.235 |
| 89 | ACTGCGGCTAGTACTGCGAGG | 2582 | TAASTAR | 3825 | 182.452 |
| 90 | TACAACGCAGGCGGAGAACAA | 2583 | YNAGGEQ | 3826 | 182.14 |
| 91 | ACCCACAACCAACGTGAACTG | 2584 | THNQREL | 3827 | 181.989 |
| 92 | ACCTTCACGGTCGACGGTAGA | 2585 | TFTVDGR | 3828 | 181.724 |
| 93 | CACTCCAGCCCCGGGTCGTCA | 2586 | HSSPGSS | 3829 | 181.331 |
| 94 | AGTACGAGTGGTTATAATACT | 2587 | STSGYNT | 3830 | 180.372 |
| 95 | TCTGAGAAGCTGACTGATAAG | 2588 | SEKLTDK | 3831 | 180.174 |
| 96 | GGGAGGAACACAAGTAACTTG | 2589 | GRNTSNL | 3832 | 180.156 |
| 97 | ACCGGAACAGCGATCTCCCGA | 2590 | TGTAISR | 3833 | 180.148 |
| 98 | TCTATGCAGGATCCTTCTTTG | 2591 | SMQDPSL | 3834 | 179.222 |
| 99 | ACTCGGAGTGATATTGGTGTG | 2592 | TRSDIGV | 3835 | 178.75 |
| 100 | ACGCAGAATCATCAGTTGTCT | 2593 | TQNHQLS | 3836 | 178.39 |
| 101 | TTTGTTGATAATAGGCAGCCT | 2594 | FVDNRQP | 3837 | 178.388 |
| 102 | AGTTTGAATTCTTCGAGTACT | 2595 | SLNSSST | 3838 | 177.704 |
| 103 | AAGGCGGTTTCGGAGATTATT | 2596 | KAVSEII | 3839 | 177.335 |
| 104 | GGTACGAGTGATAATTATAGG | 2597 | GTSDNYR | 3840 | 176.93 |
| 105 | ATGTCTAGCCACACCGTCCAA | 2598 | MSSHTVQ | 3841 | 176.741 |
| 106 | AGTATCACCCACAGCAACACC | 2599 | SITHSNT | 3842 | 176.571 |
| 107 | GTTCAGACTAGTACTGGTGCT | 2600 | VQTSTGA | 3843 | 176.399 |
| 108 | CGTGGTGATATGACTCGTGCG | 2601 | RGDMTRA | 3844 | 176.36 |
| 109 | ATTGGTCTGCAGAATTCTACT | 2602 | IGLQNST | 3845 | 176.164 |
| 110 | AGTGCGGATCGTGATAATAAG | 2603 | SADRDNK | 3846 | 173.544 |
| 111 | TACTCTCAATCCATAAAAAAC | 2604 | YSQSIKN | 3847 | 172.725 |
| 112 | CGCTCGTTGGACAGCGGGATG | 2605 | RSLDSGM | 3848 | 172.632 |
| 113 | GCTGTGCCTCAGTCTCTGCCT | 2606 | AVPQSLP | 3849 | 172.274 |
| 114 | GCGAATGATAGTATTAAGCTG | 2607 | ANDSIKL | 3850 | 172.18 |
| 115 | AATGGTAATATTTATCCGTCT | 2608 | NGNIYPS | 3851 | 171.981 |
| 116 | GGGCAAACAAACGCAGTACAC | 2609 | GQTNAVH | 3852 | 171.5364 |
| 117 | CAAGGAGACCTACGTGGCTCG | 2610 | QGDLRGS | 3853 | 171.042 |
| 118 | GTTAAGGCGAGTGCTGGGGTT | 2611 | VKASAGV | 3854 | 170.5608 |
| 119 | ATCGCGTCAACGTGGAACATG | 2612 | IASTWNM | 3855 | 170.52 |
| 120 | AACTCGGCTGAATCCTCGAGA | 2613 | NSAESSR | 3856 | 170.31 |
| 121 | GTCTTCACGGGCCAAACTGAA | 2614 | VFTGQTE | 3857 | 170.216 |
| 122 | TTTGGTACTTCTTATACGACT | 2615 | FGTSYTT | 3858 | 169.719 |
| 123 | GCGGTTAATGAGACTAGGCTT | 2616 | AVNETRL | 3859 | 168.767 |
| 124 | GGTCGGACGGATACTCCTAAT | 2617 | GRTDTPN | 3860 | 168.735 |
| 125 | AACGACCGACCGCTTGCCAGC | 2618 | NDRPLAS | 3861 | 168.71 |
| 126 | GCTTATCAGCTGACTCCGGCT | 2619 | AYQLTPA | 3862 | 168.579 |
| 127 | ATGGGTGAGATGGGTAATATT | 2620 | MGEMGNI | 3863 | 168.24 |
| 128 | GCGGACATGCAACACACCGTA | 2621 | ADMQHTV | 3864 | 168.055 |
| 129 | GCGGTTGTTCTGAATAGTAAT | 2622 | AVVLNSN | 3865 | 168.021 |
| 130 | TTTCGTGATGGTCAGGGTATG | 2623 | FRDGQGM | 3866 | 167.193 |
| 131 | AAATCGACATCAAACATCGAA | 2624 | KSTSNIE | 3867 | 166.8294 |
| 132 | ACCCAAGCCTTCTCCCTAGGC | 2625 | TQAFSLG | 3868 | 166.751 |
| 133 | TGGTCGAGAACTGGAAACACC | 2626 | WSRTGNT | 3869 | 166.483 |
| 134 | AGCACAAACACCGAACCTAGG | 2627 | STNTEPR | 3870 | 165.304 |
| 135 | GAGAATAGTGATTTGTCTTAT | 2628 | ENSDLSY | 3871 | 165.08 |
| 136 | ATAGACGAACGTTCCTCGATA | 2629 | IDERSSI | 3872 | 165.02 |
| 137 | GATGTGCATTCGAGTATTCCT | 2630 | DVHSSIP | 3873 | 164.85 |
| 138 | ATAAGCGGTTCCACTACACAC | 2631 | ISGSTTH | 3874 | 164.788 |
| 139 | TGGCAAACCCAAGTCACTACA | 2632 | WQTQVTT | 3875 | 164.759 |
| 140 | AACATGGGTCCAATGGGCCGG | 2633 | NMGPMGR | 3876 | 164.41 |
| 141 | GTTACCCAATCGTCCACGCTA | 2634 | VTQSSTL | 3877 | 164.175 |
| 142 | ATTGATCGTAGTGCTAGTTTG | 2635 | IDRSASL | 3878 | 164.016 |
| 143 | TCTCATAGTATTACGGGTCTT | 2636 | SHSITGL | 3879 | 163.92 |
| 144 | AAAGCGGGACAACTAGTGGAA | 2637 | KAGQLVE | 3880 | 163.845 |
| 145 | AGCGGTGTATCAGAAGGAAAC | 2638 | SGVSEGN | 3881 | 163.413 |
| 146 | ACGCTTACATTATCTACCCTC | 2639 | TLTLSTL | 3882 | 163.242 |
| 147 | GCCCACAACAAACACGAAAGT | 2640 | AHNKHES | 3883 | 162.975 |
| 148 | CACAACAACAACCTGCAAAAC | 2641 | HNNNLQN | 3884 | 162.633 |
| 149 | TATAATGAGTCTTCGAATGCG | 2642 | YNESSNA | 3885 | 161.92 |
| 150 | CGTGAGCAGGCTGCGGAGAGG | 2643 | REQAAER | 3886 | 161.523 |
| 151 | ACTCAGTATGGTACTCTGCCG | 2644 | TQYGTLP | 3887 | 161.32 |
| 152 | CATCCTGGGAATAGTTCTGTG | 2645 | HPGNSSV | 3888 | 161.2 |
| 153 | AGTTCTAGGGAGGTGAGTCCG | 2646 | SSREVSP | 3889 | 161.091 |
| 154 | GCAAACTCCACAAGCCAATGG | 2647 | ANSTSQW | 3890 | 160.842 |
| 155 | CGCGACATGATCAACTCATCA | 2648 | RDMINSS | 3891 | 160.83 |
| 156 | GCATTGCCCAGCGGCGCACGA | 2649 | ALPSGAR | 3892 | 160.765 |
| 157 | CCTGGCACCAGTGGATCCCGA | 2650 | PGTSGSR | 3893 | 159.7012 |
| 158 | TGGAACGGAAACGCCACACAA | 2651 | WNGNATQ | 3894 | 158.413 |
| 159 | GGTAAAGCAACCTTAGTCCTC | 2652 | GKATLVL | 3895 | 158.386 |
| 160 | TACACCAACGGGGGCCACCTA | 2653 | YTNGGHL | 3896 | 158.346 |
| 161 | TCACAATACAACGGAACGCAA | 2654 | SQYNGTQ | 3897 | 157.872 |
| 162 | TATTCTAGTGAGAGTGCTTAT | 2655 | YSSESAY | 3898 | 157.56 |
| 163 | GTTAAGGCGGGGGTGGCTGAT | 2656 | VKAGVAD | 3899 | 157.534 |
| 164 | ACGATGGGGACGGTGCAGATT | 2657 | TMGTVQI | 3900 | 157.384 |
| 165 | GGTGTGGCTGGTGCGGTGGTG | 2658 | GVAGAVV | 3901 | 156.882 |
| 166 | TATGATAAGACTTTGAGTGTT | 2659 | YDKTLSV | 3902 | 156.791 |
| 167 | CATGGGAGTGCGTATTCGCAG | 2660 | HGSAYSQ | 3903 | 156.45 |
| 168 | ACGGCTAATATTATGAGTAAG | 2661 | TANIMSK | 3904 | 155.935 |
| 169 | TTTTCGCGGGAGACGCTGGCG | 2662 | FSRETLA | 3905 | 155.888 |
| 170 | TTGAGTGGTGCTGGTAGTCAG | 2663 | LSGAGSQ | 3906 | 155.554 |
| 171 | AGTAATGCGAATCAGATGAGT | 2664 | SNANQMS | 3907 | 155.28 |
| 172 | TCGGTCCTTTCGCCTTCGAAC | 2665 | SVLSPSN | 3908 | 154.987 |
| 173 | GATAATGTGCATGGGCAGGTG | 2666 | DNVHGQV | 3909 | 154.72 |
| 174 | GACGGACGAGAATACGCCTCG | 2667 | DGREYAS | 3910 | 154.33 |
| 175 | ATTTCGAATCAGATTAAGATG | 2668 | ISNQIKM | 3911 | 154.262 |
| 176 | GGTCGAGACAACCAACACGTA | 2669 | GRDNQHV | 3912 | 154.136 |
| 177 | CGTAATCATGAGACTGGGGCT | 2670 | RNHETGA | 3913 | 153.8093 |
| 178 | AGTGGGAGTGGTGCGAATATT | 2671 | SGSGANI | 3914 | 153.55 |
| 179 | TCTATGTCTGATGGGCTTCGG | 2672 | SMSDGLR | 3915 | 153.296 |
| 180 | AAGGAGAGTAGTGCTATGGAG | 2673 | KESSAME | 3916 | 153.04 |
| 181 | GCTAATGCTAGTACTAGTCTG | 2674 | ANASTSL | 3917 | 152.807 |
| 182 | AGTGCTTCTGGTTATTTGGTT | 2675 | SASGYLV | 3918 | 152.79 |
| 183 | GATACTACTCAGAAGCCTCAT | 2676 | DTTQKPH | 3919 | 152.687 |
| 184 | CTAATACGAGGTTCCATGGAA | 2677 | LIRGSME | 3920 | 152.55 |
| 185 | GACCGCACCTACTCAAACACA | 2678 | DRTYSNT | 3921 | 152.447 |
| 186 | GCTCTTGGGCATCAGGGGAAT | 2679 | ALGHQGN | 3922 | 152.38 |
| 187 | GCTAATCATACGTCGCAGGAG | 2680 | ANHTSQE | 3923 | 152.056 |
| 188 | GAGAGGGGTTTGAATACTAAT | 2681 | ERGLNTN | 3924 | 151.4 |
| 189 | ACTGTTGGTGGTAATCATCAT | 2682 | TVGGNHH | 3925 | 151.384 |
| 190 | CCGAGTGATAGGACTACTTAT | 2683 | PSDRTTY | 3926 | 151.365 |
| 191 | TCCAGGCAAGAAAACTTCTCC | 2684 | SRQENFS | 3927 | 151.22 |
| 192 | AATAAGACGACGATGGAGTTT | 2685 | NKTTMEF | 3928 | 151.16 |
| 193 | AAACACACAGAAAACGGGACC | 2686 | KHTENGT | 3929 | 150.985 |
| 194 | GAAACCGGAGCTATGACCTCT | 2687 | ETGAMTS | 3930 | 150.803 |
| 195 | GGTCATAGGGATTCGGGTGGT | 2688 | GHRDSGG | 3931 | 149.991 |
| 196 | AGAAACGCCGAAGGCGGATTG | 2689 | RNAEGGL | 3932 | 149.919 |
| 197 | GGGCAGCGTACGACGAATGAT | 2690 | GQRTTND | 3933 | 149.903 |
| 198 | TATAATGATGCTCTTAGGCCG | 2691 | YNDALRP | 3934 | 149.88 |
| 199 | GGGTATGCGACTACGGTTCAG | 2692 | GYATTVQ | 3935 | 149.694 |
| 200 | ATAGGGGGAGGCATAGGAAAC | 2693 | IGGGIGN | 3936 | 149.622 |
| 201 | GTGGCGGTGTCTAATACGCCT | 2694 | VAVSNTP | 3937 | 148.5637 |
| 202 | CTTGCGAATGGTATGACGGCT | 2695 | LANGMTA | 3938 | 148.449 |
| 203 | ATTTCTGGGTCGTCGTCTCTT | 2696 | ISGSSSL | 3939 | 148.328 |
| 204 | TCTAATGTTCATGTTGTTAAT | 2697 | SNVHVVN | 3940 | 148.32 |
| 205 | GTGGAGACTTCGCGTCTGTAT | 2698 | VETSRLY | 3941 | 148.302 |
| 206 | TCGAACGCAGACATCCTCGCC | 2699 | SNADILA | 3942 | 148.08 |
| 207 | AACAACGTAAACCCGTACTCG | 2700 | NNVNPYS | 3943 | 148.016 |
| 208 | ATAAGTGTAGGTGTGTCCGTA | 2701 | ISVGVSV | 3944 | 147.84 |
| 209 | TCCGCAAACAACATAGCCCCC | 2702 | SANNIAP | 3945 | 147.813 |
| 210 | GGTGTTCAGATGACTGCGGGG | 2703 | GVQMTAG | 3946 | 147.527 |
| 211 | CGTTACATCGCCAACCAAACA | 2704 | RYIANQT | 3947 | 147.305 |
| 212 | ACCACCGAAAGTCTACACCTT | 2705 | TTESLHL | 3948 | 146.899 |
| 213 | GGCTACCAAGACAAAACACGA | 2706 | GYQDKTR | 3949 | 146.705 |
| 214 | GCTTCGCGGCCTGCGGCTCAG | 2707 | ASRPAAQ | 3950 | 146.364 |
| 215 | TCTATTCAGGAGCTGTTGAGG | 2708 | SIQELLR | 3951 | 146.287 |
| 216 | ACTGTGCGTTCGCCTCAGCAG | 2709 | TVRSPQQ | 3952 | 145.74 |
| 217 | GCGGTTCTTGGTGGTAGTAAT | 2710 | AVLGGSN | 3953 | 145.633 |
| 218 | ATGAGTACGGTTCTTCGGGAG | 2711 | MSTVLRE | 3954 | 144.928 |
| 219 | ACTTATGGTATTACTCATGAT | 2712 | TYGITHD | 3955 | 144.751 |
| 220 | GATGCGAATGCGGGTACGAGG | 2713 | DANAGTR | 3956 | 144.597 |
| 221 | TTCAACGGGTACGTCATGGCA | 2714 | FNGYVMA | 3957 | 144.536 |
| 222 | ATTAATAATTTTAATACTCTG | 2715 | INNFNTL | 3958 | 144.08 |
| 223 | GTAGCCAACGAACGCCTACCG | 2716 | VANERLP | 3959 | 143.64 |
| 224 | ACTAATTCTAATCAGGGTTCG | 2717 | TNSNQGS | 3960 | 143.617 |
| 225 | GCGACGCTGAATAATAGTTAT | 2718 | ATLNNSY | 3961 | 143.512 |
| 226 | AAAAACGCTCAAATAGACCTA | 2719 | KNAQIDL | 3962 | 142.66 |
| 227 | CCTGCTACGCTACACCTGACA | 2720 | PATLHLT | 3963 | 142.552 |
| 228 | TTAGGATCGAGCACAGTATCG | 2721 | LGSSTVS | 3964 | 142.325 |
| 229 | AATTGGAATTCTGAGGGTACG | 2722 | NWNSEGT | 3965 | 142.257 |
| 230 | CCAACAAACAACTTAAGTATG | 2723 | PTNNLSM | 3966 | 141.91 |
| 231 | GCGCTTAAGCCGAATTCTACG | 2724 | ALKPNST | 3967 | 141.737 |
| 232 | ATGGTGAATTCGGAGAATACT | 2725 | MVNSENT | 3968 | 141.624 |
| 233 | AGTATGGATGCTCGGTTGACG | 2726 | SMDARLT | 3969 | 141.6 |
| 234 | AATAATGTTGTTAGGGATGAT | 2727 | NNVVRDD | 3970 | 141.597 |
| 235 | ACAAGGGACCAAAGGTCTACA | 2728 | TRDQRST | 3971 | 141.592 |
| 236 | GCTGACATCCGGAACGACAAA | 2729 | ADIRNDK | 3972 | 141.468 |
| 237 | ATGCGGGATAAGATTAATCCG | 2730 | MRDKINP | 3973 | 141.468 |
| 238 | CCGACTCCTAATGAGCATATG | 2731 | PTPNEHM | 3974 | 141.465 |
| 239 | GGATACTCACACAACTCCGAC | 2732 | GYSHNSD | 3975 | 141.448 |
| 240 | CTTCGGGATGGGATTGCTTCT | 2733 | LRDGIAS | 3976 | 141.105 |
| 241 | ATGAACCAAATGGGCGGCCTG | 2734 | MNQMGGL | 3977 | 141.089 |
| 242 | TCTTCGCCTACTAAGGGTACT | 2735 | SSPTKGT | 3978 | 140.803 |
| 243 | TATTTGGATAATCCGTTGACG | 2736 | YLDNPLT | 3979 | 140.516 |
| 244 | GTCATGCAACGATCTGCACAA | 2737 | VMQRSAQ | 3980 | 140.2 |
| 245 | TCTCTGCAACTCACAGCGGGT | 2738 | SLQLTAG | 3981 | 140.161 |
| 246 | GTGGGGTCTGGGGGTTATAAT | 2739 | VGSGGYN | 3982 | 140.139 |
| 247 | GATCGTCCGAATAATGTGTCG | 2740 | DRPNNVS | 3983 | 140.036 |
| 248 | TTGACTGAGAAGGCTTCTATT | 2741 | LTEKASI | 3984 | 139.945 |
| 249 | ACCACAAAAACGACATCTATG | 2742 | TTKTTSM | 3985 | 139.556 |
| 250 | CGTTTGGACCTGCAAGTCCAC | 2743 | RLDLQVH | 3986 | 139.528 |
| 251 | ACTCATGTGATTGGGGCTGTG | 2744 | THVIGAV | 3987 | 139.34 |
| 252 | ACCCTGACACACCTAAACCCA | 2745 | TLTHLNP | 3988 | 139.142 |
| 253 | ACCTCAATATCGTCGCAAAGC | 2746 | TSISSQS | 3989 | 138.884 |
| 254 | TACCACACCCACCAAGTCGCA | 2747 | YHTHQVA | 3990 | 138.871 |
| 255 | ATGCAAGGGCTTAACAACATG | 2748 | MQGLNNM | 3991 | 138.848 |
| 256 | GGTAGTGCGAGTAATAGTGGT | 2749 | GSASNSG | 3992 | 138.841 |
| 257 | GCGAATACTACGGGGCAGGTG | 2750 | ANTTGQV | 3993 | 138.7122 |
| 258 | AGCGTTGTCAACACCAACATC | 2751 | SVVNTNI | 3994 | 138.699 |
| 259 | TCTAATAATCTGAATCAGGAG | 2752 | SNNLNQE | 3995 | 138.543 |
| 260 | ATGAATGGGAGTGGGATGCAG | 2753 | MNGSGMQ | 3996 | 138.484 |
| 261 | ATAAGTCACGACCTTAAATAC | 2754 | ISHDLKY | 3997 | 138.458 |
| 262 | ACGGTTAATGCGGATGGGTCG | 2755 | TVNADGS | 3998 | 138.21 |
| 263 | AATCATATTAGGAATCCTATG | 2756 | NHIRNPM | 3999 | 138.143 |
| 264 | AGTACGCGGGTTACTCTGGAT | 2757 | STRVTLD | 4000 | 137.85 |
| 265 | GCTATGGGAGCACTCGTGCAC | 2758 | AMGALVH | 4001 | 137.838 |
| 266 | GCGCAAGCCATGTCAAACAGC | 2759 | AQAMSNS | 4002 | 137.76 |
| 267 | AATGCTAATGGTATGAATACT | 2760 | NANGMNT | 4003 | 137.343 |
| 268 | TTGACGCTTCCTAGTGCTAAT | 2761 | LTLPSAN | 4004 | 137.264 |
| 269 | TACCAAACGGGAGACAAAGAC | 2762 | YQTGDKD | 4005 | 137.017 |
| 270 | AGACGGGAAGAAAACGTCAAC | 2763 | RREENVN | 4006 | 136.962 |
| 271 | GGAACTACCACGGCAGTCGCG | 2764 | GTTTAVA | 4007 | 136.8811 |
| 272 | ACGGCTGGTGGGGAGCGTGCG | 2765 | TAGGERA | 4008 | 136.6 |
| 273 | GCCGGTAACGAACCTAGACCC | 2766 | AGNEPRP | 4009 | 136.593 |
| 274 | GCAAACAACACAGCCAACAGT | 2767 | ANNTANS | 4010 | 136.498 |
| 275 | CATGTGAATAGTAGGGATCTT | 2768 | HVNSRDL | 4011 | 136.187 |
| 276 | ACATACCAACTTTCCGGCAAC | 2769 | TYQLSGN | 4012 | 136.059 |
| 277 | CGGGGTGATTCGATGGCTCGG | 2770 | RGDSMAR | 4013 | 135.8517 |
| 278 | TTGAATAATTCTGCGACTGTT | 2771 | LNNSATV | 4014 | 135.76 |
| 279 | CTACACGCTAACAACGAACGG | 2772 | LHANNER | 4015 | 135.723 |
| 280 | ATGGGTTCTACGACTGGTGTG | 2773 | MGSTTGV | 4016 | 135.16 |
| 281 | GTAGTTGCAGGGCACGCAATG | 2774 | VVAGHAM | 4017 | 135.1261 |
| 282 | GGCAACGAAAAACCATCAGGG | 2775 | GNEKPSG | 4018 | 135.016 |
| 283 | CGTGGTACGGAGGGGACGCCG | 2776 | RGTEGTP | 4019 | 134.8972 |
| 284 | TGGTCCCCCGGACCCGAAGCC | 2777 | WSPGPEA | 4020 | 134.66 |
| 285 | ATTAATGTGAATCAGATGGCG | 2778 | INVNQMA | 4021 | 134.472 |
| 286 | CGGTCGGACGTTATGCAAAGT | 2779 | RSDVMQS | 4022 | 134.362 |
| 287 | AGGGACGTAAGTACAAAAGAA | 2780 | RDVSTKE | 4023 | 134.36 |
| 288 | AAAAAGTCACCCAGACTTGAA | 2781 | KKSPRLE | 4024 | 134.35 |
| 289 | ACGAGCAACACAATGTCAGAC | 2782 | TSNTMSD | 4025 | 134.345 |
| 290 | TCTAAAGGAAACGAACAAATG | 2783 | SKGNEQM | 4026 | 134.224 |
| 291 | GGTTACGCTACGACCGTGCAA | 2784 | GYATTVQ | 4027 | 134.185 |
| 292 | GGATACATGTCTAACGTCATA | 2785 | GYMSNVI | 4028 | 133.922 |
| 293 | GTGACTGTTAGTCTGGATGGG | 2786 | VTVSLDG | 4029 | 133.879 |
| 294 | ACGAATAATTTGCTGGCTCAG | 2787 | TNNLLAQ | 4030 | 133.517 |
| 295 | GCGCAGACGACGGGGTATACG | 2788 | AQTTGYT | 4031 | 133.295 |
| 296 | AGTAAGTCGACTGAGATTATG | 2789 | SKSTEIM | 4032 | 133.249 |
| 297 | TCTGCGATGCACACATTAGTC | 2790 | SAMHTLV | 4033 | 133.226 |
| 298 | GCTGGGGTGCGTGAGTCGTTT | 2791 | AGVRESF | 4034 | 133.15 |
| 299 | CAAGGCAACTCAATGGCGTCC | 2792 | QGNSMAS | 4035 | 132.82 |
| 300 | AAAAACCCGAGTGTCCAAGAA | 2793 | KNPSVQE | 4036 | 132.519 |
| 301 | CCCATAACACGGGAATCGGGA | 2794 | PITRESG | 4037 | 132.424 |
| 302 | AGCCGCTCGGCAGAAATATCG | 2795 | SRSAEIS | 4038 | 131.747 |
| 303 | AACGACATCCCCACACGAGCC | 2796 | NDIPTRA | 4039 | 131.424 |
| 304 | GCATACGGATCGTCCGGAAGA | 2797 | AYGSSGR | 4040 | 131.375 |
| 305 | CTTCATGGGAATTTTAGTCAG | 2798 | LHGNFSQ | 4041 | 131.002 |
| 306 | GCATCCAACGGGCAAGTTAAC | 2799 | ASNGQVN | 4042 | 130.736 |
| 307 | CAGAAGGGGACGGTTACTCTG | 2800 | QKGTVTL | 4043 | 130.375 |
| 308 | AACTCTAGTAACACTGGTTGG | 2801 | NSSNTGW | 4044 | 130.26 |
| 309 | ACGTATCAGCATCAGGGTCCG | 2802 | TYQHQGP | 4045 | 130.231 |
| 310 | GACGGGGTCGCACACCGCTCA | 2803 | DGVAHRS | 4046 | 130.216 |
| 311 | GACGGGCTCACGCTGGAACGC | 2804 | DGLTLER | 4047 | 130.09 |
| 312 | AGGGGTGATCTATCTACGCCT | 2805 | RGDLSTP | 4048 | 130.02 |
| 313 | ATTAATGAGATTGGTAGGATG | 2806 | INEIGRM | 4049 | 129.944 |
| 314 | CCCCAATGGGGAACTGACCCG | 2807 | PQWGTDP | 4050 | 129.94 |
| 315 | AAGCAGGTGGCGCATATTGAT | 2808 | KQVAHID | 4051 | 129.831 |
| 316 | AATACTTTGCAGAATAGTCAT | 2809 | NTLQNSH | 4052 | 129.563 |
| 317 | TGGAGCCAAGGGAACACAGCG | 2810 | WSQGNTA | 4053 | 129.438 |
| 318 | AACGAAACGCACGTACCTAAA | 2811 | NETHVPK | 4054 | 129.35 |
| 319 | GTAACGAACGAATCCCGCGCC | 2812 | VTNESRA | 4055 | 129.059 |
| 320 | CCCGAAGGCCACATGCAAGAC | 2813 | PEGHMQD | 4056 | 129 |
| 321 | TTGGATTCGACTAATTCTAGG | 2814 | LDSTNSR | 4057 | 128.63 |
| 322 | CAGTCGATTGGGCATCCGGTG | 2815 | QSIGHPV | 4058 | 128.17 |
| 323 | GTCCTGGTTAACGTACACAAC | 2816 | VLVNVHN | 4059 | 128.078 |
| 324 | GTGCATAATCCTACTACTACG | 2817 | VHNPTTT | 4060 | 127.727 |
| 325 | GGGGATAAGGCGAGTTTGGCG | 2818 | GDKASLA | 4061 | 127.698 |
| 326 | CTAAACGAATCCCGAGCGTCG | 2819 | LNESRAS | 4062 | 127.597 |
| 327 | GGTTTTCATATTAATGGTGAG | 2820 | GFHINGE | 4063 | 127.526 |
| 328 | AGTGTTAGTTCTGTGGTGTTG | 2821 | SVSSVVL | 4064 | 127.19 |
| 329 | CTTTCGACTACTTCGACGAAG | 2822 | LSTTSTK | 4065 | 127.153 |
| 330 | ACTAATACGCAGAATAATCCG | 2823 | TNTQNNP | 4066 | 127.089 |
| 331 | ACTAATCTTGCTGTTACGCTG | 2824 | TNLAVTL | 4067 | 127.0208 |
| 332 | ATGTCGGATCGTACTTCTGAT | 2825 | MSDRTSD | 4068 | 126.91 |
| 333 | TCCGCGCAATCTTTCGTAGTT | 2826 | SAQSFVV | 4069 | 126.906 |
| 334 | ATGCACACAAGTAGACCCCCA | 2827 | MHTSAPP | 4070 | 126.861 |
| 335 | ATGTCTAGCCACACAGTCCAA | 2828 | MSSHTVQ | 4071 | 126.79 |
| 336 | AGGGATACGGCTAAGGGGGTG | 2829 | RDTAKGV | 4072 | 126.773 |
| 337 | GCGTTAAAATCCGACAGCGCC | 2830 | ALKSDSA | 4073 | 126.73 |
| 338 | CAATACGACGCCAGCCGACAA | 2831 | QYDASRQ | 4074 | 126.66 |
| 339 | TTAGCCGACTCAAACAGCAAA | 2832 | LADSNSK | 4075 | 126.48 |
| 340 | TTTCAGTTGGCTAGTAATCCG | 2833 | FQLASNP | 4076 | 126.372 |
| 341 | AACTCTGTCGTAGGGAACATC | 2834 | NSVVGNI | 4077 | 126.308 |
| 342 | AGGTATGAGAGTACTAGTGCT | 2835 | RYESTSA | 4078 | 126.21 |
| 343 | GCGGATCATAATCATATTGCT | 2836 | ADHNHIA | 4079 | 126.21 |
| 344 | GTAGGCGACCAATCCCGCCCG | 2837 | VGDQSRP | 4080 | 126.106 |
| 345 | TTCAACGAAACTGCCGGGCGA | 2838 | FNETAGR | 4081 | 125.693 |
| 346 | AGCAACTCGTACTTACTCAAC | 2839 | SNSYLLN | 4082 | 125.52 |
| 347 | CGAGGCGACACAAAGAACTAC | 2840 | RGDTKNY | 4083 | 125.09 |
| 348 | ACGACTACTACTATGGCATAC | 2841 | TTTTMAY | 4084 | 125.064 |
| 349 | CGACCCCCGAACGAAAACAGA | 2842 | RPPNENR | 4085 | 124.7157 |
| 350 | TGCGCCAACATGACCAACGGC | 2843 | CANMTNG | 4086 | 124.6 |
| 351 | AATCGGTCGGATAGTTTTGCG | 2844 | NRSDSFA | 4087 | 124.567 |
| 352 | AATCTTTTGACTTCGTCGCCT | 2845 | NLLTSSP | 4088 | 124.54 |
| 353 | AACTCCAGGGAAATGGGTGTA | 2846 | NSREMGV | 4089 | 124.539 |
| 354 | ATGGGGAATCAGAGTGGTGCG | 2847 | MGNQSGA | 4090 | 124.506 |
| 355 | ATGCTCACAGAAACCAAAGCA | 2848 | MLTETKA | 4091 | 124.3 |
| 356 | CAAAACATCAAAAACATGACA | 2849 | QNIKNMT | 4092 | 124.1 |
| 357 | ATGAGTACGGTTCTTCGCGAG | 2850 | MSTVLRE | 4093 | 124.05 |
| 358 | GACCGTGCCCAAAACAACGAA | 2851 | DRAQNNE | 4094 | 123.95 |
| 359 | CATACGCAGTCGACGGGTTAT | 2852 | HTQSTGY | 4095 | 123.943 |
| 360 | ATGAGTGTGGGGAAGGTTTAT | 2853 | MSVGKVY | 4096 | 123.919 |
| 361 | GCCGGAAACTACCAATCATCA | 2854 | AGNYQSS | 4097 | 123.855 |
| 362 | AGAAACGAAAACGTAAACGCT | 2855 | RNENVNA | 4098 | 123.777 |
| 363 | GACACCCACCACACATCCAGT | 2856 | DTHHTSS | 4099 | 123.766 |
| 364 | ACTAGCTCCCCTGTTCTACAA | 2857 | TSSPVLQ | 4100 | 123.762 |
| 365 | GTGGGCCGTGACGCAGAAGCT | 2858 | VGRDAEA | 4101 | 123.74 |
| 366 | AACATGGAAAGAGGATCGCAA | 2859 | NMERGSQ | 4102 | 123.646 |
| 367 | GACAGACAAACAGGCCAAAAA | 2860 | DRQTGQK | 4103 | 123.6413 |
| 368 | GTCTTCCGGGAAGGCATCGTG | 2861 | VFREGIV | 4104 | 123.54 |
| 369 | TCCGCAAACAACATAGCCACC | 2862 | SANNIAT | 4105 | 123.32 |
| 370 | GTATCAGAAGGACAACGAATC | 2863 | VSEGQRI | 4106 | 123.005 |
| 371 | CACTACGGTAACAAAGACATA | 2864 | HYGNKDI | 4107 | 122.894 |
| 372 | GATGTTTTGCTTAAGAATTTT | 2865 | DVLLKNF | 4108 | 122.89 |
| 373 | CACACGGTTCAAATACGCGAA | 2866 | HTVQIRE | 4109 | 122.8082 |
| 374 | ACATCAGCACTAGCACACCAA | 2867 | TSALAHQ | 4110 | 122.78 |
| 375 | ATCCCAACCGGCCAAACTAGC | 2868 | IPTGQTS | 4111 | 122.752 |
| 376 | CGCAGCGACAAAGGAACGTTG | 2869 | RSDKGTL | 4112 | 122.7439 |
| 377 | AATGGTCTTACGGTTCAGCGG | 2870 | NGLTVQR | 4113 | 122.718 |
| 378 | ACGGTTGAGGGTTCTTATCCG | 2871 | TVEGSYP | 4114 | 122.67 |
| 379 | ACTAGCCACTTAGTACTTGCA | 2872 | TSHLVLA | 4115 | 122.653 |
| 380 | AATCATAGTCTGTCGGAGCAT | 2873 | NHSLSEH | 4116 | 122.5 |
| 381 | TTAACAGGCATGAACAGAGAC | 2874 | LTGMNRD | 4117 | 122.335 |
| 382 | AGTCACAACGCTGGGGTCGCC | 2875 | SHNAGVA | 4118 | 122.285 |
| 383 | GCGCACCAAACCGCCGGGCCA | 2876 | AHQTAGP | 4119 | 122.22 |
| 384 | AATTCTCATGATTTGAAGTAT | 2877 | NSHDLKY | 4120 | 121.99 |
| 385 | ACTACAATGAGTACCGGTCAA | 2878 | TTMSTGQ | 4121 | 121.98 |
| 386 | GGGTTCGGGCACGTGCCCGAA | 2879 | GFGHVPE | 4122 | 121.974 |
| 387 | ATCACCGCCGCGTCACCGCAA | 2880 | ITAASPQ | 4123 | 121.868 |
| 388 | GTTAAGGCGAGTGCTGGGGAT | 2881 | VKASAGD | 4124 | 121.75 |
| 389 | AGTATCACACACAGCAACACC | 2882 | SITHSNT | 4125 | 121.75 |
| 390 | CATAATAATAATATGCTGAAT | 2883 | HNNNMLN | 4126 | 121.659 |
| 391 | CCCAAAACTCTAACTTCGACA | 2884 | PKTLTST | 4127 | 121.479 |
| 392 | ATAACCGGCAACACCGTCGGA | 2885 | ITGNTVG | 4128 | 121.385 |
| 393 | CTCGGAAACCACTACACACCC | 2886 | LGNHYTP | 4129 | 121.38 |
| 394 | TCGTTTACTAATACGAATCCT | 2887 | SFTNTNP | 4130 | 121.294 |
| 395 | ACGTTGGATCGGAATCAGACT | 2888 | TLDRNQT | 4131 | 121.25 |
| 396 | ATCTCTACGCAAAGACCGCAC | 2889 | ISTQRPH | 4132 | 121.2071 |
| 397 | ACATTCACTACTCTGGGCAAA | 2890 | TFTTLGK | 4133 | 121.179 |
| 398 | GAGAAGCCTTCTCTTGTGATG | 2891 | EKPSLVM | 4134 | 120.927 |
| 399 | CACATCGAAACCAACACTTCG | 2892 | HIETNTS | 4135 | 120.834 |
| 400 | GGTACGAAGGATATTCTGATT | 2893 | GTKDILI | 4136 | 120.792 |
| 401 | GCGACTTTTAGTCATGCTGGT | 2894 | ATFSHAG | 4137 | 120.788 |
| 402 | GCCAACGGCATATTCCAACCG | 2895 | ANGIFQP | 4138 | 120.646 |
| 403 | CTTAATGTGAATACGCTTAAT | 2896 | LNVNTLN | 4139 | 120.55 |
| 404 | ACTTCTGCTAGTGAGAATTGG | 2897 | TSASENW | 4140 | 120.5 |
| 405 | CTTCTTCAGGGTGCGACTAAG | 2898 | LLQGATK | 4141 | 120.358 |
| 406 | GCTCTTGAGACTACTCGTGCT | 2899 | ALETTRA | 4142 | 120.26 |
| 407 | TTAACGGGACAAAACGAATTC | 2900 | LTGQNEF | 4143 | 120.24 |
| 408 | ATTTCTCATGATTTGAAGAAT | 2901 | ISHDLKN | 4144 | 120.191 |
| 409 | GCACAATACAACAACGGCGTA | 2902 | AQYNNGV | 4145 | 120.19 |
| 410 | ACGACGTCTGTGGAGAAGACT | 2903 | TTSVEKT | 4146 | 120.106 |
| 411 | GGTACGTCGGCTATTATGCCT | 2904 | GTSAIMP | 4147 | 120.093 |
| 412 | CAGCTGCAGGGGACTGAGGCG | 2905 | QLQGTEA | 4148 | 120.02 |
| 413 | GCCTTAAAATCCCAAGAACCA | 2906 | ALKSQEP | 4149 | 120.007 |
| 414 | TCTAACAGCAGTGTTGCGGTA | 2907 | SNSSVAV | 4150 | 119.89 |
| 415 | AATCATGGTCGTGCTATTGAT | 2908 | NHGRAID | 4151 | 119.776 |
| 416 | GATACGTATAATAGTAATACT | 2909 | DTYNSNT | 4152 | 119.6 |
| 417 | ACATTCCACCAAGCGGTCAAA | 2910 | TFHQAVK | 4153 | 119.54 |
| 418 | TGGCATACTGGTGTGTTTCAG | 2911 | WHTGVFQ | 4154 | 119.48 |
| 419 | AGGGGTGATCTTTCTACGCCA | 2912 | RGDLSTP | 4155 | 119.47 |
| 420 | ATGCTTAGTCAGGTTCTGACG | 2913 | MLSQVLT | 4156 | 119.414 |
| 421 | GAAAACGAAAAACGAGAAAGC | 2914 | ENEKRES | 4157 | 119.391 |
| 422 | ATTTCGAGTTATGATGGTAAT | 2915 | ISSYDGN | 4158 | 119.38 |
| 423 | ACTCGTGGCGACATGGAATTC | 2916 | TRGDMEF | 4159 | 119.36 |
| 424 | AATGTGCAGAATGTGCCTGGG | 2917 | NVQNVPG | 4160 | 119.3363 |
| 425 | TCTTTCACGAACACAAACCCA | 2918 | SFTNTNP | 4161 | 119.24 |
| 426 | TCGAACGCTGGCTACCACTCG | 2919 | SNAGYHS | 4162 | 119.169 |
| 427 | GACTACAAAAACAGCGCGCCA | 2920 | DYKNSAP | 4163 | 119.136 |
| 428 | GTCGGGAAAAACTCGTACGAA | 2921 | VGKNSYE | 4164 | 119.129 |
| 429 | GCTTACGCAGGTGTACTTGGG | 2922 | AYAGVLG | 4165 | 119.123 |
| 430 | ACGACGTCTGAGCGTGTGAAT | 2923 | TTSERVN | 4166 | 119.105 |
| 431 | GACACCGGAATCAAAAACGTT | 2924 | DTGIKNV | 4167 | 119.05 |
| 432 | TCGACCAGCTCTCTGGTTCCC | 2925 | STSSLVP | 4168 | 119.006 |
| 433 | TGGAGCGCCGGCGAACGGGTG | 2926 | WSAGERV | 4169 | 118.995 |
| 434 | AGTTCGGGGAGTTTGATTACT | 2927 | SSGSLIT | 4170 | 118.945 |
| 435 | TGGATTTCTACTGAGATGAGG | 2928 | WISTEMR | 4171 | 118.93 |
| 436 | TTTGCGGCTGGGGCGCATGGT | 2929 | FAAGAHG | 4172 | 118.92 |
| 437 | ATAGGCGACCGCGACCAACGT | 2930 | IGDRDQR | 4173 | 118.886 |
| 438 | AGTACGATTGGTAATTCTACT | 2931 | STIGNST | 4174 | 118.8619 |
| 439 | GGAAGTGGCACCGTCGGTCGA | 2932 | GSGTVGR | 4175 | 118.714 |
| 440 | CATGTTACGGCGGTGGTTGAT | 2933 | HVTAVVD | 4176 | 118.706 |
| 441 | GATAAGGCGGGGGTGGCTAAT | 2934 | DKAGVAN | 4177 | 118.67 |
| 442 | CGTCTGACTGATACTATGCAT | 2935 | RLTDTMH | 4178 | 118.589 |
| 443 | CTGAACACTCTAATCCACAAA | 2936 | LNTLIHK | 4179 | 118.565 |
| 444 | AGTTATCAGAATCCTCCGCCT | 2937 | SYQNPPP | 4180 | 118.512 |
| 445 | TTGACAGGATTAAACGCTTTC | 2938 | LTGLNAF | 4181 | 118.45 |
| 446 | AGTCCTGTGCTTTCTCCTTCG | 2939 | SPVLSPS | 4182 | 118.377 |
| 447 | GTTCAAACACACATAGGAGTC | 2940 | VQTHIGV | 4183 | 118.36 |
| 448 | CATATGTCTTCTGTTGCGACT | 2941 | HMSSVAT | 4184 | 118.34 |
| 449 | GGAAAAGCCAACGACGGTTCT | 2942 | GKANDGS | 4185 | 118.333 |
| 450 | AGTACTAACGACGAACGCAAA | 2943 | STNDERK | 4186 | 118.28 |
| 451 | CAGGGGGGGAATAGTCGGTTT | 2944 | QGGNSRF | 4187 | 118.236 |
| 452 | CCTAACAACGAAAAAAACCCG | 2945 | PNNEKNP | 4188 | 118.22 |
| 453 | GTGGCTGCGACGGGTGGTACT | 2946 | VAATGGT | 4189 | 118.173 |
| 454 | GCGATTGTGGATAGGGGGAGT | 2947 | AIVDRGS | 4190 | 118.167 |
| 455 | TCCCAACACCACACGCCACTG | 2948 | SQHHTPL | 4191 | 118.137 |
| 456 | TTACAAAGCTCGATGAACGTA | 2949 | LQSSMNV | 4192 | 118.073 |
| 457 | CGAGAAACCAACCCGTCTGAA | 2950 | RETNPSE | 4193 | 117.941 |
| 458 | GGGTTCGGGCACCTGCCCGAA | 2951 | GFGHLPE | 4194 | 117.86 |
| 459 | CGGAATGCTACTGTGACTGTT | 2952 | RNATVTV | 4195 | 117.852 |
| 460 | GTTTCAAACGCTTCGGGCTTA | 2953 | VSNASGL | 4196 | 117.707 |
| 461 | GATCGTCCGAATAATGAGTCG | 2954 | DRPNNES | 4197 | 117.7 |
| 462 | CAGGTTAGTCTGGTGAAGTTG | 2955 | QVSLVKL | 4198 | 117.643 |
| 463 | AGTAATATGCGTGAGGAGATT | 2956 | SNMREEI | 4199 | 117.629 |
| 464 | GATATTGGGCGTTCGAATAGT | 2957 | DIGRSNS | 4200 | 117.45 |
| 465 | GATCATATGAATTTGAGGTCT | 2958 | DHMNLRS | 4201 | 117.365 |
| 466 | ATTGAGCGTAGTAGTGATCGT | 2959 | IERSSDR | 4202 | 117.358 |
| 467 | TTGTCTCAGAATTTTAATCCT | 2960 | LSQNFNP | 4203 | 117.3026 |
| 468 | TATTCTATGGGTCAGCAGCCG | 2961 | YSMGQQP | 4204 | 117.283 |
| 469 | TACACACAAGGGATAATGAAC | 2962 | YTQGIMN | 4205 | 117.22 |
| 470 | ATGCTGTCTCATGGTGCGCTT | 2963 | MLSHGAL | 4206 | 117.165 |
| 471 | GCTTATAATGCTCGTCTGCCT | 2964 | AYNARLP | 4207 | 116.957 |
| 472 | AGACACTACTCCGACAACGCC | 2965 | RHYSDNA | 4208 | 116.945 |
| 473 | GCACACACAGCCATGACCTAC | 2966 | AHTAMTY | 4209 | 116.935 |
| 474 | CTAACAGGCTCTGACATGAAA | 2967 | LTGSDMK | 4210 | 116.89 |
| 475 | ACCTTACACACGAAAGACTTG | 2968 | TLHTKDL | 4211 | 116.879 |
| 476 | TCGGGTCAAAACGGTACATCA | 2969 | SGQNGTS | 4212 | 116.851 |
| 477 | CGTGGGGACGTCCACACCAAC | 2970 | RGDVHTN | 4213 | 116.829 |
| 478 | ACCGGAACGGCTACACTCCCA | 2971 | TGTATLP | 4214 | 116.72 |
| 479 | CTGGGTACGCTGCTTAGTCAG | 2972 | LGTLLSQ | 4215 | 116.72 |
| 480 | GTCCTCTCCTCCAACCTGTAC | 2973 | VLSSNLY | 4216 | 116.707 |
| 481 | AGTTTGGGGTCGGATCGTATG | 2974 | SLGSDRM | 4217 | 116.61 |
| 482 | AGGGGAGATCTTTCTACGCCT | 2975 | RGDLSTP | 4218 | 116.59 |
| 483 | AGGATGTCGGAGAGTTCTGAT | 2976 | RMSESSD | 4219 | 116.585 |
| 484 | ATGACTGAGAAGGCTTCTATT | 2977 | MTEKASI | 4220 | 116.54 |
| 485 | ACAGAACAATCTTACTAACGA | 2978 | TEQSY*R | 4221 | 116.54 |
| 486 | GTTGAATCTAAATCCGAACCA | 2979 | VESKSEP | 4222 | 116.536 |
| 487 | ATGAATCTTGTGAGGGATTCG | 2980 | MNLVRDS | 4223 | 116.526 |
| 488 | CAAAACCACTCTATAACAACA | 2981 | QNHSITT | 4224 | 116.51 |
| 489 | ACGCTGGACAACAACCACAGC | 2982 | TLDNNHS | 4225 | 116.42 |
| 490 | ACGAAGAGTTTTAATGATCTT | 2983 | TKSFNDL | 4226 | 116.38 |
| 491 | GCCACAGAACACTCAGGGCGC | 2984 | ATEHSGR | 4227 | 116.34 |
| 492 | CAAGGGACTCTCTTGTCTCCA | 2985 | QGTLLSP | 4228 | 116.293 |
| 493 | ACATTCCACCAAGGGGTCAAA | 2986 | TFHQGVK | 4229 | 116.175 |
| 494 | TGTCAGCGGGCTGATTGTGCG | 2987 | CQRADCA | 4230 | 116.17 |
| 495 | CGGTATGATGGTACTCTTAAT | 2988 | RYDGTLN | 4231 | 115.929 |
| 496 | CAAGGCGGTACAAACAACCCC | 2989 | QGGTNNP | 4232 | 115.853 |
| 497 | GGGGGTAACTACCACACCACT | 2990 | GGNYHTT | 4233 | 115.838 |
| 498 | CTGGTTGTTCAGAGTGCGCAG | 2991 | LVVQSAQ | 4234 | 115.7942 |
| 499 | TATCCTCATGAGAGTAAGAAT | 2992 | YPHESKN | 4235 | 115.731 |
| 500 | GAGATTGTTAGGCATACGCAT | 2993 | EIVRHTH | 4236 | 115.724 |
| 501 | GACCGGACAAACAACATGAGC | 2994 | DRTNNMS | 4237 | 115.705 |
| 502 | TCCGTAACCAACGGAGCGGAA | 2995 | SVTNGAE | 4238 | 115.66 |
| 503 | AGCGGACAAAAAAACTCAGAA | 2996 | SGQKNSE | 4239 | 115.653 |
| 504 | GAGCAGAAGAAGACTGATCAT | 2997 | EQKKTDH | 4240 | 115.565 |
| 505 | AATATTAATGGTGGGGGGAAT | 2998 | NINGGGN | 4241 | 115.563 |
| 506 | AAGCTGCATACTAAGGATCTT | 2999 | KLHTKDL | 4242 | 115.54 |
| 507 | AGCTTCTTGGTAGCCCACCCA | 3000 | SFLVAHP | 4243 | 115.4 |
| 508 | TACCAACAAAACATAGAAATC | 3001 | YQQNIEI | 4244 | 115.388 |
| 509 | AGGGGTGATCTTTCTACGACT | 3002 | RGDLSTT | 4245 | 115.31 |
| 510 | GCGAACCTCAACTTGACCAGT | 3003 | ANLNLTS | 4246 | 115.305 |
| 511 | ACGGTGCAGCATGCGGCGACG | 3004 | TVQHAAT | 4247 | 115.231 |
| 512 | ACCGTAAACCTCCTAGCGGCA | 3005 | TVNLLAA | 4248 | 115.223 |
| 513 | AACCAAAGAGTTGAACAAAAA | 3006 | NQRVEQK | 4249 | 115.222 |
| 514 | AATACTTATACTGCTGCGAAG | 3007 | NTYTAAK | 4250 | 115.189 |
| 515 | ATCCAAAGAGACGTGGGCCAC | 3008 | IQRDVGH | 4251 | 115.098 |
| 516 | ATCTCAGAAATGACTAGGTAC | 3009 | ISEMTRY | 4252 | 115.098 |
| 517 | ATTGCTACTAATGTGATTTAT | 3010 | IATNVIY | 4253 | 115.089 |
| 518 | AACGGCAACCACTCCATAGAC | 3011 | NGNHSID | 4254 | 115.062 |
| 519 | ACGAGTATTGGTAGTGCTAAG | 3012 | TSIGSAK | 4255 | 115.036 |
| 520 | AACGTACACTCTGTTGACAAA | 3013 | NVHSVDK | 4256 | 114.987 |
| 521 | GAACTCTCCGTTCCGAAACCA | 3014 | ELSVPKP | 4257 | 114.93 |
| 522 | TTCCTCGACAAATACAACTAC | 3015 | FLDKYNY | 4258 | 114.888 |
| 523 | TACATCCCGAACAACTCAGGA | 3016 | YIPNNSG | 4259 | 114.881 |
| 524 | GGGCTAGGACAACCCCAACTC | 3017 | GLGQPQL | 4260 | 114.817 |
| 525 | GAGGGGAGTCAGGGGAATCAT | 3018 | EGSQGNH | 4261 | 114.66 |
| 526 | AATATTTATATGGCGAGTGGT | 3019 | NIYMASG | 4262 | 114.66 |
| 527 | AATTTGCAGACTGGTGTTCAG | 3020 | NLQTGVQ | 4263 | 114.65 |
| 528 | ACCGTCGCTCCCTACAGTAGC | 3021 | TVAPYSS | 4264 | 114.65 |
| 529 | TCAAACTACTCTGACGGAATA | 3022 | SNYSDGI | 4265 | 114.649 |
| 530 | GCTACTTACGTTGTCGGAACA | 3023 | ATYVVGT | 4266 | 114.64 |
| 531 | TCAAGGGAAGCGGGTTCAACT | 3024 | SREAGST | 4267 | 114.622 |
| 532 | GCCGGAAAAACCCACGCCGAC | 3025 | AGKTHAD | 4268 | 114.6 |
| 533 | CCGCTTTCTCTTCATAATAGT | 3026 | PLSLHNS | 4269 | 114.589 |
| 534 | CTTCGAGACCTAAACGGAGGA | 3027 | LRDLNGG | 4270 | 114.553 |
| 535 | GATAGGACGTATTCGAATACG | 3028 | DRTYSNT | 4271 | 114.548 |
| 536 | TCGGTCACCAGTGGAACACAA | 3029 | SVTSGTQ | 4272 | 114.541 |
| 537 | AATATGACTTCGGCTTATCAT | 3030 | NMTSAYH | 4273 | 114.52 |
| 538 | GTTATGGGTGGTCCTGGGATT | 3031 | VMGGPGI | 4274 | 114.491 |
| 539 | GCTGGGACTCATACTGATAAG | 3032 | AGTHTDK | 4275 | 114.444 |
| 540 | GGTACTATGAATATTGGTATT | 3033 | GTMNIGI | 4276 | 114.356 |
| 541 | ACAGCCGGCGGCGAACGCGCC | 3034 | TAGGERA | 4277 | 114.34 |
| 542 | GGTATGACTTCTAATCAGGTT | 3035 | GMTSNQV | 4278 | 114.298 |
| 543 | CATTTTTCGCAGATTACTAAT | 3036 | HESQITN | 4279 | 114.278 |
| 544 | AGCAGGATAGAAAACAACAAC | 3037 | SRIENNN | 4280 | 114.055 |
| 545 | GATACGGCGAGTTATAATAAT | 3038 | DTASYNN | 4281 | 114 |
| 546 | GTGAATCAGAGTCCTGGGGCT | 3039 | VNQSPGA | 4282 | 113.85 |
| 547 | AATAATATGGGTCATGGTCAT | 3040 | NNMGHGH | 4283 | 113.837 |
| 548 | TCGCGGCTATCACAAGACCCC | 3041 | SRLSQDP | 4284 | 113.832 |
| 549 | TCTACGTCTCAGGCTGTGCAG | 3042 | STSQAVQ | 4285 | 113.802 |
| 550 | CGATGGCAAGGACTGAGCGCG | 3043 | RWQGLSA | 4286 | 113.76 |
| 551 | GCGCATATGCATTCGGAGTTG | 3044 | AHMHSEL | 4287 | 113.74 |
| 552 | AATAATCTTACGAATTCGACG | 3045 | NNLTNST | 4288 | 113.736 |
| 553 | CAGCCTAGTGCGAGTGAGCTT | 3046 | QPSASEL | 4289 | 113.731 |
| 554 | GGGACTTCCTTGGAAAACCGA | 3047 | GTSLENR | 4290 | 113.709 |
| 555 | CTGTCTAATTCGATTACGCCT | 3048 | LSNSITP | 4291 | 113.683 |
| 556 | ACCATAGTGTCCACTTCTTAC | 3049 | TIVSTSY | 4292 | 113.628 |
| 557 | ACCCTAGGCTACCCAGACAAA | 3050 | TLGYPDK | 4293 | 113.563 |
| 558 | TCAAGACACGACGTCCGAAAC | 3051 | SRHDVRN | 4294 | 113.559 |
| 559 | AATGGTAGTGTGGCTAATCCT | 3052 | NGSVANP | 4295 | 113.48 |
| 560 | GCGATGGATGGGTATAGGGTT | 3053 | AMDGYRV | 4296 | 113.462 |
| 561 | TGGACGGGCGCACAACCTTCT | 3054 | WTGAQPS | 4297 | 113.3493 |
| 562 | AAAAACGGCGCCATAGGAACA | 3055 | KNGAIGT | 4298 | 113.335 |
| 563 | GTACTTCCAAGTCGGATCGCG | 3056 | VLPSRIA | 4299 | 113.3 |
| 564 | GATAATGTGAATTCTCAGCCT | 3057 | DNVNSQP | 4300 | 113.207 |
| 565 | GGCGTAAACGCTAGCTACAGC | 3058 | GVNASYS | 4301 | 113.174 |
| 566 | CTGTCTCACGCCATGGACCGG | 3059 | LSHAMDR | 4302 | 113.127 |
| 567 | AGGGCTCATGGGGATAATCAG | 3060 | RAHGDNQ | 4303 | 113.036 |
| 568 | TTGCAGACGCCTGGGACGACG | 3061 | LQTPGTT | 4304 | 113.01 |
| 569 | ACTCAGGTTGTTAGTATTTAT | 3062 | TQVVSIY | 4305 | 113.001 |
| 570 | CAGGTTCAGGGGACTCTGGGG | 3063 | QVQGTLG | 4306 | 112.9928 |
| 571 | GTGGGCAACCAAAACTTACCC | 3064 | VGNQNLP | 4307 | 112.889 |
| 572 | TATGTTGATTATAGTAAGTCG | 3065 | YVDYSKS | 4308 | 112.872 |
| 573 | CTGCTTAATTCTTCGGGTGTG | 3066 | LLNSSGV | 4309 | 112.857 |
| 574 | AATCAGTCGCTTACTATGGAT | 3067 | NQSLTMD | 4310 | 112.793 |
| 575 | GCTGGTAAGGATCTTAGTAAT | 3068 | AGKDLSN | 4311 | 112.792 |
| 576 | TCTTACGTTAGCGTCCCCGCC | 3069 | SYVSVPA | 4312 | 112.668 |
| 577 | AATGAGGGGCGTGTGCAGACT | 3070 | NEGRVQT | 4313 | 112.6219 |
| 578 | ACTTTGACGCAGACTGGGATG | 3071 | TLTQTGM | 4314 | 112.588 |
| 579 | GGCTTCGCATTAACTGGCACC | 3072 | GFALTGT | 4315 | 112.564 |
| 580 | CAGTCGACGCTGAATAGGCCT | 3073 | QSTLNRP | 4316 | 112.5575 |
| 581 | ACAACAACACACTCCATCTCC | 3074 | TTTHSIS | 4317 | 112.547 |
| 582 | AACACACACAGACAAGAATAC | 3075 | NTHRQEY | 4318 | 112.522 |
| 583 | TCCCAAATAGTCAACACCACA | 3076 | SQIVNTT | 4319 | 112.519 |
| 584 | CTGGTGCTTGAGATGCAGACG | 3077 | LVLEMQT | 4320 | 112.492 |
| 585 | AACGACATCTCCACCCAACGG | 3078 | NDISTQR | 4321 | 112.444 |
| 586 | TACACCGCCGACAAAAAACAA | 3079 | YTADKKQ | 4322 | 112.402 |
| 587 | TTCGGAGCAACCACCACAGCA | 3080 | FGATTTA | 4323 | 112.399 |
| 588 | GTTCAGATTTCTATGAATAAT | 3081 | VQISMNN | 4324 | 112.364 |
| 589 | ATGCATGCGCAGGAGTCTCGT | 3082 | MHAQESR | 4325 | 112.324 |
| 590 | CATGTGAATACTGCTGATCGG | 3083 | HVNTADR | 4326 | 112.313 |
| 591 | TACAGTACAGACTCCACCAAA | 3084 | YSTDSTK | 4327 | 112.271 |
| 592 | GGACACGACCGAACACCAAAC | 3085 | GHDRTPN | 4328 | 112.213 |
| 593 | ACGAGTGGTGTGCTTACGCGG | 3086 | TSGVLTR | 4329 | 112.212 |
| 594 | AATATTGCTATGTCTAAGATT | 3087 | NIAMSKI | 4330 | 112.204 |
| 595 | ATGGGGACTGAGTATCGTATG | 3088 | MGTEYRM | 4331 | 112.185 |
| 596 | CCTTATGCGAATAGGCTTGAG | 3089 | PYANRLE | 4332 | 112.174 |
| 597 | CCGCTTCAGAATAATAAGACG | 3090 | PLQNNKT | 4333 | 112.172 |
| 598 | TCCTTGACGGAAAAAGCGCCG | 3091 | SLTEKAP | 4334 | 112.15 |
| 599 | AATATGGTGTATACGAATGTG | 3092 | NMVYTNV | 4335 | 112.077 |
| 600 | ATGTTAAGTGCCACCCAAGGG | 3093 | MLSATQG | 4336 | 112.047 |
| 601 | AACATGACTCACTCAACCGTA | 3094 | NMTHSTV | 4337 | 112.0108 |
| 602 | ATTTATACGAATAGTCATGTT | 3095 | IYTNSHV | 4338 | 111.93 |
| 603 | TGGTCGCATGATCGGCCTACT | 3096 | WSHDRPT | 4339 | 111.926 |
| 604 | GAAAAAGGCACACCAAGTAGC | 3097 | EKGTPSS | 4340 | 111.922 |
| 605 | CATCATTCTACTGAGTCGTTG | 3098 | HHSTESL | 4341 | 111.911 |
| 606 | CCAAAAAGCACCCAAGTAATG | 3099 | PKSTQVM | 4342 | 111.846 |
| 607 | AGTGATAGGACTGCTCAGCAG | 3100 | SDRTAQQ | 4343 | 111.845 |
| 608 | GCTACCCTCGCACGGACCTCA | 3101 | ATLARTS | 4344 | 111.8417 |
| 609 | ATTTCTCAGGTGTCTTTTAAT | 3102 | ISQVSFN | 4345 | 111.81 |
| 610 | CATTATGGGAATAAGGATATT | 3103 | HYGNKDI | 4346 | 111.805 |
| 611 | AATGATGGGACTGATCGTAGG | 3104 | NDGTDRR | 4347 | 111.574 |
| 612 | ACCAACCACATAACCGGTCCA | 3105 | TNHITGP | 4348 | 111.551 |
| 613 | ACTAATTCTAATCAGAGTTCG | 3106 | TNSNQSS | 4349 | 111.532 |
| 614 | GTGGCGACTCATTATAATGAG | 3107 | VATHYNE | 4350 | 111.52 |
| 615 | GACCTCGGTACGGCTAGAACC | 3108 | DLGTART | 4351 | 111.516 |
| 616 | GCTCTTAGTCAGAGTGCGGGT | 3109 | ALSQSAG | 4352 | 111.4957 |
| 617 | AAAACCACCCTACACCAAGCA | 3110 | KTTLHQA | 4353 | 111.46 |
| 618 | ATGATAAACGCCATAACTCCA | 3111 | MINAITP | 4354 | 111.432 |
| 619 | GGGTCTACGCCGGGGGCGAGT | 3112 | GSTPGAS | 4355 | 111.327 |
| 620 | AATGAGAAGCCGCAGTCGACG | 3113 | NEKPQST | 4356 | 111.309 |
| 621 | TCATTGATGGGCAGTGCAGGA | 3114 | SLMGSAG | 4357 | 111.287 |
| 622 | ACCGACACGCTCAGCGAAAGA | 3115 | TDTLSER | 4358 | 111.25 |
| 623 | GCCTCGCAATCAGAAAAAAAC | 3116 | ASQSEKN | 4359 | 111.223 |
| 624 | GCTGTTAGAACACCGGCAATG | 3117 | AVRTPAM | 4360 | 111.215 |
| 625 | CCTAATGCTAGTTTTGGTCCG | 3118 | PNASFGP | 4361 | 111.172 |
| 626 | AAAGCCCACGTTGTAGAAATA | 3119 | KAHVVEI | 4362 | 111.166 |
| 627 | TATATTTCGGCGCCTCCGATG | 3120 | YISAPPM | 4363 | 111.15 |
| 628 | CCAATCCAAAACGAATCGTCC | 3121 | PIQNESS | 4364 | 111.128 |
| 629 | GGCGTAACCAACGCTTCCAAA | 3122 | GVTNASK | 4365 | 111.107 |
| 630 | GTAAACGGGGGAAAACCAGTC | 3123 | VNGGKPV | 4366 | 111.096 |
| 631 | AGTGTTCTGAGTAGTTCGACT | 3124 | SVLSSST | 4367 | 111.07 |
| 632 | TTAGCACAAGGCACGGACCGG | 3125 | LAQGTDR | 4368 | 111.032 |
| 633 | CAGTCTGTGTCGACTGGGGCG | 3126 | QSVSTGA | 4369 | 110.982 |
| 634 | TTGACGCAGGTTTATCATGAG | 3127 | LTQVYHE | 4370 | 110.91 |
| 635 | AGAGAAATGAGCAGCCTATCT | 3128 | REMSSLS | 4371 | 110.891 |
| 636 | ACGAGTACGATGACTGCGCGT | 3129 | TSTMTAR | 4372 | 110.835 |
| 637 | ACTATTCAGCAGGTTAGTAAT | 3130 | TIQQVSN | 4373 | 110.832 |
| 638 | AGGACGCAAGCAGGGGACTCA | 3131 | RTQAGDS | 4374 | 110.83 |
| 639 | AATACTTATACTGCTGGGAAG | 3132 | NTYTAGK | 4375 | 110.816 |
| 640 | AATGAGCAGAATACGCCGAGT | 3133 | NEQNTPS | 4376 | 110.79 |
| 641 | GGATTCGCCCAACAAGAAGCG | 3134 | GFAQQEA | 4377 | 110.775 |
| 642 | AGTCCGCAGCATGGTGTTATT | 3135 | SPQHGVI | 4378 | 110.7 |
| 643 | GCAGTCCACGCAACATCATCA | 3136 | AVHATSS | 4379 | 110.653 |
| 644 | GGAGACACCCGTGGTGCACAC | 3137 | GDTRGAH | 4380 | 110.63 |
| 645 | GTAAGAGAAACCACACACCTC | 3138 | VRETTHL | 4381 | 110.627 |
| 646 | CTTTCTCAACAACGCGACTAC | 3139 | LSQQRDY | 4382 | 110.6 |
| 647 | GCGACTAGGGGTGAGTCGTCT | 3140 | ATRGESS | 4383 | 110.56 |
| 648 | ACTAATGATTCTGTGGGTAGT | 3141 | TNDSVGS | 4384 | 110.545 |
| 649 | CTTACTAATAATTTTAAGGAT | 3142 | LTNNFKD | 4385 | 110.519 |
| 650 | GTGAATGGGACTCAGATTTTT | 3143 | VNGTQIF | 4386 | 110.47 |
| 651 | GGTAATACTGGGAGTCCGGGG | 3144 | GNTGSPG | 4387 | 110.431 |
| 652 | TGGACAGCTAACCAAGGCTTA | 3145 | WTANQGL | 4388 | 110.43 |
| 653 | AATACTACTCCGACGAATCAT | 3146 | NTTPTNH | 4389 | 110.42 |
| 654 | GAACGAGTCAACGGGATGGCA | 3147 | ERVNGMA | 4390 | 110.405 |
| 655 | AAAGTCACAAACAACGCATAC | 3148 | KVTNNAY | 4391 | 110.363 |
| 656 | TTATCCTCCGAATCACCCAGG | 3149 | LSSESPR | 4392 | 110.346 |
| 657 | CATACGGCGGCGGTTGCTACT | 3150 | HTAAVAT | 4393 | 110.27 |
| 658 | TACGACAGCCGACTCTACGCG | 3151 | YDSRLYA | 4394 | 110.263 |
| 659 | ATAGAACACATGCTTAGACCC | 3152 | LEHMLRP | 4395 | 110.221 |
| 660 | TACCTAGAATCCAACTACACC | 3153 | YLESNYT | 4396 | 110.18 |
| 661 | GCGTACTCATCTACCGGGCAC | 3154 | AYSSTGH | 4397 | 110.176 |
| 662 | ATCGACATATCGACGCAAAGC | 3155 | IDISTQS | 4398 | 110.14 |
| 663 | ACAACAAACTCAGGCGCGACG | 3156 | TTNSGAT | 4399 | 110.139 |
| 664 | AACGTGCTAACCACGGTTGTC | 3157 | NVLTTVV | 4400 | 110.107 |
| 665 | ACAACCGGAATCGAACGTTCC | 3158 | TTGLERS | 4401 | 110.106 |
| 666 | GCACGAGTGGACACCAACCAA | 3159 | ARVDTNQ | 4402 | 110.09 |
| 667 | CAGAGTGTGAAGGAGGCGATT | 3160 | QSVKEAI | 4403 | 110.069 |
| 668 | GCGTTGCTTAGTGTGAATGAG | 3161 | ALLSVNE | 4404 | 110.013 |
| 669 | GGGCGTGATAATCATCATGCG | 3162 | GRDNHHA | 4405 | 109.959 |
| 670 | ATTCAGTCGCAGTCGCAGTTG | 3163 | IQSQSQL | 4406 | 109.941 |
| 671 | AGTGAGGGTAGTTCGCGGTCG | 3164 | SEGSSRS | 4407 | 109.9403 |
| 672 | GACGTCCAAAACATACGCGAA | 3165 | DVQNIRE | 4408 | 109.921 |
| 673 | AAAGGCCACGCCTACGAAGCC | 3166 | KGHAYEA | 4409 | 109.897 |
| 674 | TATGTTAGGGCGCAGGATCAG | 3167 | YVRAQDQ | 4410 | 109.876 |
| 675 | GTCGACGAATACCGAAGCCGC | 3168 | VDEYRSR | 4411 | 109.853 |
| 676 | ACTCTCTCAGGCTACATGAGA | 3169 | TLSGYMR | 4412 | 109.808 |
| 677 | CCTAGTGTCCGTTTGCCCTTA | 3170 | PSVRLPL | 4413 | 109.742 |
| 678 | AACATAGCAGGCGGAGAACAA | 3171 | NIAGGEQ | 4414 | 109.702 |
| 679 | CTGCTCCAATCGACCTACTTG | 3172 | LLQSTYL | 4415 | 109.672 |
| 680 | CAGTCGGATACGACTTCGATT | 3173 | QSDTTSI | 4416 | 109.605 |
| 681 | ATTAGGTCTGGGAATGCGATG | 3174 | IRSGNAM | 4417 | 109.554 |
| 682 | ATGCTGTCTCAAGTCTTAACA | 3175 | MLSQVLT | 4418 | 109.536 |
| 683 | ACAGAACGCCAAATCGAATTA | 3176 | TERQLEL | 4419 | 109.488 |
| 684 | GGAACCCACGCCTCAGCATAC | 3177 | GTHASAY | 4420 | 109.477 |
| 685 | GTTGAGTCTTCTTATTCTCGG | 3178 | VESSYSR | 4421 | 109.457 |
| 686 | GGTGGGAATTATCATACTAAG | 3179 | GGNYHTK | 4422 | 109.445 |
| 687 | CCCACCAGTCACCAAGAACCC | 3180 | PTSHQEP | 4423 | 109.418 |
| 688 | ACCATAATCGGTGTCTTACCC | 3181 | TIIGVLP | 4424 | 109.381 |
| 689 | TCTAACAGCGGTTCTACCCTC | 3182 | SNSGSTL | 4425 | 109.379 |
| 690 | TCGATAACGACCGTAGCGAAC | 3183 | SITTVAN | 4426 | 109.347 |
| 691 | GCGTCTCCGGCGCAGACCGGC | 3184 | ASPAQTG | 4427 | 109.331 |
| 692 | TCGTTGCCGAGTCATAGTAAT | 3185 | SLPSHSN | 4428 | 109.3106 |
| 693 | CTACACAACGCCGTCGGACCC | 3186 | LHNAVGP | 4429 | 109.307 |
| 694 | CAAGCCCCGCCAACAGCACAA | 3187 | QAPPTAQ | 4430 | 109.294 |
| 695 | CCTAATACTGCTAGTAATTTT | 3188 | PNTASNF | 4431 | 109.249 |
| 696 | CCCTCCAACAGTGAAAGATTC | 3189 | PSNSERF | 4432 | 109.227 |
| 697 | GAACTCCACGCACAACAACCA | 3190 | ELHAQQP | 4433 | 109.194 |
| 698 | GGTTCTTATTCTGATGGTAGT | 3191 | GSYSDGS | 4434 | 109.162 |
| 699 | TATGGTGTGCAGGCGAATAGT | 3192 | YGVQANS | 4435 | 109.152 |
| 700 | GAAGTAGGTAAAACCACCCAC | 3193 | EVGKTTH | 4436 | 109.116 |
| 701 | ACTTCGCAGGGTAGGAGTCCT | 3194 | TSQGRSP | 4437 | 109.097 |
| 702 | GTAGAACACGTAGCCCACCAA | 3195 | VEHVAHQ | 4438 | 109.092 |
| 703 | ATCCAAAGCAGCTACAACCGC | 3196 | IQSSYNR | 4439 | 109.073 |
| 704 | ACGCTATCGGTTACCCTGGGT | 3197 | TLSVTLG | 4440 | 109.046 |
| 705 | CGGAATGAGCCGGTTAGTACT | 3198 | RNEPVST | 4441 | 108.981 |
| 706 | GTGATTGTGGGGAGTAATGAG | 3199 | VIVGSNE | 4442 | 108.955 |
| 707 | GAGCTGTCTACTCCTATGGTT | 3200 | ELSTPMV | 4443 | 108.948 |
| 708 | GCTTACAACGACCTACGATCA | 3201 | AYNDLRS | 4444 | 108.942 |
| 709 | AACGCGAACTCCGGTGAACGA | 3202 | NANSGER | 4445 | 108.906 |
| 710 | TTGTCATCACAATGGACACAA | 3203 | LSSQWTQ | 4446 | 108.9 |
| 711 | ATCAACGCCGGCAACTACCGA | 3204 | INAGNYR | 4447 | 108.883 |
| 712 | CTGAGGTCGAGTGAGGCTCCG | 3205 | LRSSEAP | 4448 | 108.866 |
| 713 | ACGTCTGATACGAATGCTAGG | 3206 | TSDTNAR | 4449 | 108.858 |
| 714 | CCGAATTCTCCGCATGGTTCT | 3207 | PNSPHGS | 4450 | 108.84 |
| 715 | ACCCAACACCTACCATCCACA | 3208 | TQHLPST | 4451 | 108.803 |
| 716 | GTGCATGGGAATGCTCCGGCT | 3209 | VHGNAPA | 4452 | 108.783 |
| 717 | TCTTCTCAGCGTGATTCTGTT | 3210 | SSQRDSV | 4453 | 108.754 |
| 718 | CCCCCCTCAGTTGACCGAAAA | 3211 | PPSVDRK | 4454 | 108.751 |
| 719 | GAGACTCTGCCGTATAAGAGT | 3212 | ETLPYKS | 4455 | 108.728 |
| 720 | CATCTTAGTCAGGCTAATCAT | 3213 | HLSQANH | 4456 | 108.727 |
| 721 | AAACCGCTAAACGGTACCAAC | 3214 | KPLNGTN | 4457 | 108.683 |
| 722 | TGGCAAACCAACGGCATGCAA | 3215 | WQTNGMQ | 4458 | 108.68 |
| 723 | ACCGTGAACGTCCACTCCGAC | 3216 | TVNVHSD | 4459 | 108.659 |
| 724 | ACCCAATACGTCGTTGCCCCT | 3217 | TQYVVAP | 4460 | 108.64 |
| 725 | AACGTCGACTCCTCTAACGTG | 3218 | NVDSSNV | 4461 | 108.62 |
| 726 | AACGGATACCAACTACAAATC | 3219 | NGYQLQI | 4462 | 108.573 |
| 727 | GAAGAAACACGGACCAGAATG | 3220 | EETRTRM | 4463 | 108.571 |
| 728 | ACCTCTCCAGCCTCTGACCGG | 3221 | TSPASDR | 4464 | 108.552 |
| 729 | CATAGTGGTGCTGGGGTTCTG | 3222 | HSGAGVL | 4465 | 108.539 |
| 730 | GCTGCTAATCCTAGTACGGAG | 3223 | AANPSTE | 4466 | 108.527 |
| 731 | ATGTTGGTACAAAACACACCC | 3224 | MLVQNTP | 4467 | 108.482 |
| 732 | GTGCAGCAGAATAATATTAAT | 3225 | VQQNNIN | 4468 | 108.473 |
| 733 | CATGATGGTTATGTTCCTAAT | 3226 | HDGYVPN | 4469 | 108.469 |
| 734 | AACTCAGGTAACAACCCCATC | 3227 | NSGNNPI | 4470 | 108.467 |
| 735 | ACGGACAACCCGTCCTACAAA | 3228 | TDNPSYK | 4471 | 108.453 |
| 736 | GGAGGCTTAAGTTTATCCTCG | 3229 | GGLSLSS | 4472 | 108.431 |
| 737 | AATAATGAGAATACGCGTAAT | 3230 | NNENTRN | 4473 | 108.418 |
| 738 | AAGAATAATAATTCTGATTCT | 3231 | KNNNSDS | 4474 | 108.367 |
| 739 | AAGGATGAGCATCTTCATTAT | 3232 | KDEHLHY | 4475 | 108.358 |
| 740 | AATTTTACTATTACGGAGGCG | 3233 | NFTITEA | 4476 | 108.32 |
| 741 | TTGAACCAAAACAGTGTCTCC | 3234 | LNQNSVS | 4477 | 108.304 |
| 742 | AATTCTCATGTTCCTAATAAT | 3235 | NSHVPNN | 4478 | 108.289 |
| 743 | AATTCTACGCATATTAATTCG | 3236 | NSTHINS | 4479 | 108.2563 |
| 744 | CATATGTCTAGTTATTCGTCG | 3237 | HMSSYSS | 4480 | 108.253 |
| 745 | AACGTACCCAACGGACAAGGA | 3238 | NVPNGQG | 4481 | 108.25 |
| 746 | AACGGTCCGACCGGATCCGCC | 3239 | NGPTGSA | 4482 | 108.245 |
| 747 | AAAAGCAACGCGGGATTCGGT | 3240 | KSNAGFG | 4483 | 108.23 |
| 748 | GCGGCCGCACTAGAAACAATA | 3241 | AAALETI | 4484 | 108.223 |
| 749 | AACCGTCAAAGGGACTTCGAA | 3242 | NRQRDFE | 4485 | 108.196 |
| 750 | GGGTCAGGGAACGAACCCGGG | 3243 | GSGNEPG | 4486 | 108.192 |
| 751 | GTTAGTGTGGCTGTGCCTGCG | 3244 | VSVAVPA | 4487 | 108.11 |
| 752 | CACTCTAACACACACTACGAA | 3245 | HSNTHYE | 4488 | 108.11 |
| 753 | CCTGACAGAGCGAACGACAAA | 3246 | PDRANDK | 4489 | 108.058 |
| 754 | CAAGTTGGGGCTCTAATGGTT | 3247 | QVGALMV | 4490 | 108.037 |
| 755 | TTAACACCCCAAGGGACTAGT | 3248 | LTPQGTS | 4491 | 108.028 |
| 756 | CTATACGACGGAAAACACGTC | 3249 | LYDGKHV | 4492 | 107.972 |
| 757 | CTAACCGAATCTGTGAGAAAC | 3250 | LTESVRN | 4493 | 107.93 |
| 758 | AGTACTTATGGGAATACTTAT | 3251 | STYGNTY | 4494 | 107.929 |
| 759 | AATGCTATTTCTACTAATAAT | 3252 | NAISTNN | 4495 | 107.907 |
| 760 | ATTGCTCATGTGTCTACTAAT | 3253 | IAHVSTN | 4496 | 107.849 |
| 761 | AGTGAGGAGAGGACGCGTGCG | 3254 | SEERTRA | 4497 | 107.833 |
| 762 | CGTTGGTCTGAAAACAACTCC | 3255 | RWSENNS | 4498 | 107.83 |
| 763 | GATGGTAATAATACGACTTAT | 3256 | DGNNTTY | 4499 | 107.748 |
| 764 | GTGACGACTGTTGATAGTGCT | 3257 | VTTVDSA | 4500 | 107.738 |
| 765 | ACCGTAAAACAAACAAGTCCG | 3258 | TVKQTSP | 4501 | 107.7213 |
| 766 | TCTATCTACCTCGCGTCCACT | 3259 | SIYLAST | 4502 | 107.712 |
| 767 | ACGACCCGAAACGAACACTCG | 3260 | TTRNEHS | 4503 | 107.707 |
| 768 | TCGTATGATATGCATACGAAT | 3261 | SYDMHTN | 4504 | 107.705 |
| 769 | GTCTCTACATACCTCCTGGCA | 3262 | VSTYLLA | 4505 | 107.687 |
| 770 | GGAGAACAAAGCCACAACCAA | 3263 | GEQSHNQ | 4506 | 107.684 |
| 771 | ACTGCCAACAACCACTCTCCG | 3264 | TANNHSP | 4507 | 107.671 |
| 772 | CAATTCCACGGGACATCTGAA | 3265 | QFHGTSE | 4508 | 107.652 |
| 773 | AACGTTCTGGGAGCGTCTAGC | 3266 | NVLGASS | 4509 | 107.64 |
| 774 | AGGGATAGTACTATTAGTCGG | 3267 | RDSTISR | 4510 | 107.635 |
| 775 | GTTATTGGGACTTCTAGGGAT | 3268 | VIGTSRD | 4511 | 107.5934 |
| 776 | AATTATGAGAAGGAGTTTGTT | 3269 | NYEKEFV | 4512 | 107.592 |
| 777 | ATGGACCAAAGCCACTCCCGA | 3270 | MDQSHSR | 4513 | 107.563 |
| 778 | AATTCTCAGAATCCTCAGGGT | 3271 | NSQNPQG | 4514 | 107.562 |
| 779 | CACACGGGCACGGACAACCGA | 3272 | HTGTDNR | 4515 | 107.5323 |
| 780 | TATAATACTGTTGATCAGCGG | 3273 | YNTVDQR | 4516 | 107.523 |
| 781 | AAAGAAAGCCTCGAAGACGTC | 3274 | KESLEDV | 4517 | 107.49 |
| 782 | ACTGCGAATAGTACGTATGTG | 3275 | TANSTYV | 4518 | 107.479 |
| 783 | TATCTGAATAGTACGCAGATT | 3276 | YLNSTQI | 4519 | 107.436 |
| 784 | CGTGTTGAAGACACCAACTCC | 3277 | RVEDTNS | 4520 | 107.416 |
| 785 | AACGACGCACGCAACCGTGCA | 3278 | NDARNRA | 4521 | 107.37 |
| 786 | AATACTAATAATCAGGAGCAG | 3279 | NTNNQEQ | 4522 | 107.332 |
| 787 | ACCGTCGGATCGAACAGTATA | 3280 | TVGSNSI | 4523 | 107.3 |
| 788 | TATGGGGAGCGTGCTAGGACG | 3281 | YGERART | 4524 | 107.297 |
| 789 | CCGACCGGAGGCTCACCACCA | 3282 | PTGGSPP | 4525 | 107.265 |
| 790 | CTTGGGCAGGTTAATTCTACG | 3283 | LGQVNST | 4526 | 107.229 |
| 791 | GTCTCGGGTCCGGTATCGGTC | 3284 | VSGPVSV | 4527 | 107.222 |
| 792 | GGTACTAATCATGATTTTTCG | 3285 | GTNHDFS | 4528 | 107.169 |
| 793 | AAGACGCTTGATAATAATGCT | 3286 | KTLDNNA | 4529 | 107.165 |
| 794 | CACAGTGAACTACGTCAAAAC | 3287 | HSELRQN | 4530 | 107.157 |
| 795 | GAGAAGAATCTGACTAATGCT | 3288 | EKNLTNA | 4531 | 107.131 |
| 796 | ACCGGACTCGGAGGCAACAGT | 3289 | TGLGGNS | 4532 | 107.113 |
| 797 | AAAGACCACATCCTCAGCCTC | 3290 | KDHILSL | 4533 | 107.108 |
| 798 | ATAACTACTGGCGGAGTGCTA | 3291 | ITTGGVL | 4534 | 107.108 |
| 799 | CTGGCTGATTCGAATTCTAAG | 3292 | LADSNSK | 4535 | 107.1 |
| 800 | AGTATTTCTGATAAGAATCAG | 3293 | SISDKNQ | 4536 | 107.08 |
| 801 | TATATTGCTGGGGGGGAGCAG | 3294 | YIAGGEQ | 4537 | 107.069 |
| 802 | TTGCCGGATAAGGGGCGGATT | 3295 | LPDKGRI | 4538 | 107.06 |
| 803 | TTGATCCAAACGCAAGGCACG | 3296 | LIQTQGT | 4539 | 107.042 |
| 804 | TACTCCGGAGAACTAAACAAA | 3297 | YSGELNK | 4540 | 107.037 |
| 805 | TGCGCATCAGAAGTTTGCCAA | 3298 | CASEVCQ | 4541 | 107.035 |
| 806 | CTTATGGCTGCTAATACTGCG | 3299 | LMAANTA | 4542 | 107.032 |
| 807 | CATCAGTCTTTTGATGCTGGT | 3300 | HQSFDAG | 4543 | 107.001 |
| 808 | GGGGAGACGCTGAGGTCTCAG | 3301 | GETLRSQ | 4544 | 106.999 |
| 809 | CAGACTGATGGTCCTAATTTT | 3302 | QTDGPNF | 4545 | 106.978 |
| 810 | ACGACGACTAATGTGAATTTT | 3303 | TTTNVNF | 4546 | 106.969 |
| 811 | AACATGACCAACGAAAACGGA | 3304 | NMTNENG | 4547 | 106.938 |
| 812 | GGGTATAGTCCTTCGACGCCG | 3305 | GYSPSTP | 4548 | 106.892 |
| 813 | TTGCAGGTTACGGTTCATAAT | 3306 | LQVTVHN | 4549 | 106.879 |
| 814 | GATCTGACGCATGTTCATCGT | 3307 | DLTHVHR | 4550 | 106.874 |
| 815 | ACGGAGCTTAGTGAGTATACT | 3308 | TELSEYT | 4551 | 106.852 |
| 816 | ATGACAGTCGCCAGTACTAGC | 3309 | MTVASTS | 4552 | 106.843 |
| 817 | AGCAGTCAAGCCCACGGCCCA | 3310 | SSQAHGP | 4553 | 106.822 |
| 818 | ACCAGAAGCCCGAACGAAGAC | 3311 | TRSPNED | 4554 | 106.81 |
| 819 | GATAATAATAAGCATGGTACT | 3312 | DNNKHGT | 4555 | 106.806 |
| 820 | AGGGAGATTGTTCATAGTAAT | 3313 | REIVHSN | 4556 | 106.802 |
| 821 | CGGAAACTTGAACTCGACCTA | 3314 | RKLELDL | 4557 | 106.801 |
| 822 | ATCTACGAAACCGTAACCTTG | 3315 | IYETVTL | 4558 | 106.801 |
| 823 | AATAGTGGTAGTACGAGTTTT | 3316 | NSGSTSF | 4559 | 106.783 |
| 824 | CCAAGTACGAACGAAAGCCGC | 3317 | PSTNESR | 4560 | 106.782 |
| 825 | CAAGCCGACCTCAGGTACAAA | 3318 | QADLRYK | 4561 | 106.773 |
| 826 | GATCAGCCGGGGTATGTGCGT | 3319 | DQPGYVR | 4562 | 106.7387 |
| 827 | GATGCTATGCTTGCTCATCCG | 3320 | DAMLAHP | 4563 | 106.735 |
| 828 | ACACGTCACGACGGCAGTACG | 3321 | TRHDGST | 4564 | 106.675 |
| 829 | CTGGCGAATATGAGTGCGCCG | 3322 | LANMSAP | 4565 | 106.664 |
| 830 | ACTGGTCATCCGCCGGCGGCG | 3323 | TGHPPAA | 4566 | 106.654 |
| 831 | TCGAGTATTAGTCTGCGGTAT | 3324 | SSISLRY | 4567 | 106.645 |
| 832 | ATGCACGTCGACAAAACGAGT | 3325 | MHVDKTS | 4568 | 106.639 |
| 833 | GGGAGTGATTCTAAGCATCCT | 3326 | GSDSKHP | 4569 | 106.5782 |
| 834 | GGAGAAAGCTCCTCAATAAGC | 3327 | GESSSIS | 4570 | 106.551 |
| 835 | GTCGTCCACTCACACAGTGAA | 3328 | VVHSHSE | 4571 | 106.496 |
| 836 | AGTGTGCGGGCGCATGTTTTG | 3329 | SVRAHVL | 4572 | 106.487 |
| 837 | GCGGATGGGGCTAAGTCTGCT | 3330 | ADGAKSA | 4573 | 106.485 |
| 838 | GGGGAAGCACGCCGAGAAGCC | 3331 | GEARREA | 4574 | 106.442 |
| 839 | TTTAATGCTACGGTGGTGCAT | 3332 | FNATVVH | 4575 | 106.437 |
| 840 | TGGACGGAAGGGGGCTCAGGA | 3333 | WTEGGSG | 4576 | 106.423 |
| 841 | GATTCTTCTTATACGCATCCG | 3334 | DSSYTHP | 4577 | 106.422 |
| 842 | TTCCCAAGTAGGGACAACGTA | 3335 | FPSRDNV | 4578 | 106.39 |
| 843 | GCCATCACGCACATCGGTACA | 3336 | AITHIGT | 4579 | 106.365 |
| 844 | GCTTTTAAGTCGGGTAGTATT | 3337 | AFKSGSI | 4580 | 106.334 |
| 845 | ATGTCAAACGCCTCCTACATA | 3338 | MSNASYI | 4581 | 106.319 |
| 846 | GCGGAGAGGAATGATAGGACG | 3339 | AERNDRT | 4582 | 106.305 |
| 847 | ACATTAGAAACAACCCGCAGC | 3340 | TLETTRS | 4583 | 106.244 |
| 848 | CGCTTACACGGCTCAGACTCG | 3341 | RLHGSDS | 4584 | 106.237 |
| 849 | TATGAGGGGCATATGAATACT | 3342 | YEGHMNT | 4585 | 106.2354 |
| 850 | TCTGTGACGACTAATCTGATG | 3343 | SVTTNLM | 4586 | 106.217 |
| 851 | TTGCGTGATCAGACTAGTATG | 3344 | LRDQTSM | 4587 | 106.167 |
| 852 | CCCGCCAGTCACAGCGCGGGA | 3345 | PASHSAG | 4588 | 106.151 |
| 853 | GTGGTTGAGAATTTGAGGCAG | 3346 | VVENLRQ | 4589 | 106.147 |
| 854 | CAACAATCACAAAACTCTATA | 3347 | QQSQNSI | 4590 | 106.115 |
| 855 | CTTGTTGATACGGATAGGAAT | 3348 | LVDTDRN | 4591 | 106.108 |
| 856 | AACGAAATGGGAAACTACGTC | 3349 | NEMGNYV | 4592 | 106.104 |
| 857 | TCCACCGACCCCCGATACTCA | 3350 | STDPRYS | 4593 | 106.097 |
| 858 | ACTAATGGTATTTATCAGCCT | 3351 | TNGIYQP | 4594 | 106.095 |
| 859 | TGGGTAAACAGTGTGGGCAAC | 3352 | WVNSVGN | 4595 | 106.084 |
| 860 | GGGGTATCTAACAACTCTAGC | 3353 | GVSNNSS | 4596 | 106.079 |
| 861 | AATGTTAATGCGCAGAGTAGG | 3354 | NVNAQSR | 4597 | 106.064 |
| 862 | ACGACGCCGCCTTTTTCTAAT | 3355 | TTPPFSN | 4598 | 106.044 |
| 863 | ACAGGCAGCTCCCACACCAAC | 3356 | TGSSHTN | 4599 | 106.0345 |
| 864 | TACGTCGACAAATCAATGACA | 3357 | YVDKSMT | 4600 | 106.009 |
| 865 | CTAATCAAAAACAACATGCTC | 3358 | LIKNNML | 4601 | 105.9827 |
| 866 | GGGGGTACGGGGTTGTCGAAG | 3359 | GGTGLSK | 4602 | 105.98 |
| 867 | GCTCTTCATAATCTGATGAAT | 3360 | ALHNLMN | 4603 | 105.977 |
| 868 | GTGCATGTGACTAATGTGTTG | 3361 | VHVTNVL | 4604 | 105.924 |
| 869 | TCGACGACGCACCCTTCCGAA | 3362 | STTHPSE | 4605 | 105.898 |
| 870 | AGCGTAGGTAGTCCAACACAC | 3363 | SVGSPTH | 4606 | 105.8936 |
| 871 | ATGAGTAATGATTTGCCTGGG | 3364 | MSNDLPG | 4607 | 105.877 |
| 872 | TTCTCGTCAACCGAAGCCAGA | 3365 | FSSTEAR | 4608 | 105.858 |
| 873 | GCCGGTCACCAACAACTGGCC | 3366 | AGHQQLA | 4609 | 105.846 |
| 874 | GGTACCATATTACCAAACCAA | 3367 | GTILPNQ | 4610 | 105.829 |
| 875 | AGCGCGGTTTCTGGTAGCAGC | 3368 | SAVSGSS | 4611 | 105.825 |
| 876 | GAGGTGTCTAGGGATGGTCTG | 3369 | EVSRDGL | 4612 | 105.814 |
| 877 | CAATCACTCAAAGACGGCACT | 3370 | QSLKDGT | 4613 | 105.804 |
| 878 | ACGCGTGAGGGTAATCATGCT | 3371 | TREGNHA | 4614 | 105.8 |
| 879 | GTGGCGACCCAAAACCTTCTT | 3372 | VATQNLL | 4615 | 105.795 |
| 880 | GCCGAAATGACGCACCGCCTC | 3373 | AEMTHRL | 4616 | 105.771 |
| 881 | CAACGGCCAGACCCGCTTAAA | 3374 | QRPDPLK | 4617 | 105.764 |
| 882 | GAACACATCTCTAGCTACGGA | 3375 | EHISSYG | 4618 | 105.752 |
| 883 | CAAAAAAGCAACGACCAAAAC | 3376 | QKSNDQN | 4619 | 105.744 |
| 884 | AATCTTGTGATGAGTGGGACG | 3377 | NLVMSGT | 4620 | 105.742 |
| 885 | GGAGCGGGACAATCTCACGTG | 3378 | GAGQSHV | 4621 | 105.721 |
| 886 | CTCAACCACACAATGCCCCTC | 3379 | LNHTMPL | 4622 | 105.713 |
| 887 | GTATCACAATCACACGACGTG | 3380 | VSQSHDV | 4623 | 105.687 |
| 888 | GCTAATTCTGCTACTAATCAG | 3381 | ANSATNQ | 4624 | 105.679 |
| 889 | GGCACAGGAGGTAACCGAGAA | 3382 | GTGGNRE | 4625 | 105.671 |
| 890 | GCGAAGTCGTCGATTATTTTG | 3383 | AKSSIIL | 4626 | 105.661 |
| 891 | GGAGGAACAGCCCTTGGGAGC | 3384 | GGTALGS | 4627 | 105.613 |
| 892 | AACAAAGTAGAATCTGACCCA | 3385 | NKVESDP | 4628 | 105.59 |
| 893 | AACTCGAAACAACCCGACGTC | 3386 | NSKQPDV | 4629 | 105.572 |
| 894 | AGTTATGCTGATCGTCGGCTG | 3387 | SYADRRL | 4630 | 105.567 |
| 895 | AATGTGAATCCGAATGGGCCG | 3388 | NVNPNGP | 4631 | 105.53 |
| 896 | GAACACAACTCAAAAACTTAC | 3389 | EHNSKTY | 4632 | 105.496 |
| 897 | ACCCAAGGATCTAACACCACA | 3390 | TQGSNTT | 4633 | 105.489 |
| 898 | AGCAACGTATCAGCTTACGCA | 3391 | SNVSAYA | 4634 | 105.48 |
| 899 | GCGTACAGTGACAGCGCCCGC | 3392 | AYSDSAR | 4635 | 105.457 |
| 900 | GGGTCGCAATACGCGAACCGC | 3393 | GSQYANR | 4636 | 105.402 |
| 901 | ACAATGAGCGTAACTCTGGAA | 3394 | TMSVTLE | 4637 | 105.393 |
| 902 | CAGACGACTATTCTGGCTGCT | 3395 | QTTILAA | 4638 | 105.386 |
| 903 | TTGCTCCAATCCATAGTGGTA | 3396 | LLQSIVV | 4639 | 105.381 |
| 904 | GTTCACGCTAACGCTACATTA | 3397 | VHANATL | 4640 | 105.38 |
| 905 | AACAAAACAAACGCCGACTAC | 3398 | NKTNADY | 4641 | 105.38 |
| 906 | AACTACGACACCGGCGCCAAA | 3399 | NYDTGAK | 4642 | 105.378 |
| 907 | GTCTACCACAACCGCGACGTT | 3400 | VYHNRDV | 4643 | 105.358 |
| 908 | GATTCTGCTCCGAGGTCTATT | 3401 | DSAPRSI | 4644 | 105.351 |
| 909 | TTGATTGCGAATCTGAGTAAT | 3402 | LIANLSN | 4645 | 105.341 |
| 910 | CCGCAAGACGTCCGCCAAACA | 3403 | PQDVRQT | 4646 | 105.331 |
| 911 | ACAATGACAGCAATAGCAATG | 3404 | TMTAIAM | 4647 | 105.327 |
| 912 | ACATACGCCTCTACTGAAGCG | 3405 | TYASTEA | 4648 | 105.324 |
| 913 | CCTCACGCCAACGGAGTGACA | 3406 | PHANGVT | 4649 | 105.298 |
| 914 | CGGGCTGATGTTTCTTGGTCT | 3407 | RADVSWS | 4650 | 105.286 |
| 915 | CTGACGCACATGACCGGAACC | 3408 | LTHMTGT | 4651 | 105.272 |
| 916 | GCAAACGACTCTGCCAAAACA | 3409 | ANDSAKT | 4652 | 105.269 |
| 917 | GCTAATTCTGGGTTGCATAAT | 3410 | ANSGLHN | 4653 | 105.246 |
| 918 | AACGTGGGCACCGACAGAGAC | 3411 | NVGTDRD | 4654 | 105.231 |
| 919 | GTCGGAACAACCTCGAACGGC | 3412 | VGTTSNG | 4655 | 105.226 |
| 920 | GGAGTTCTTGGGATACTGGTC | 3413 | GVLOLV | 4656 | 105.184 |
| 921 | CGAATCAACGCAGCAATCGAC | 3414 | RINAAID | 4657 | 105.1475 |
| 922 | CCCGACACTCGCCCATCCATA | 3415 | PDTRPSI | 4658 | 105.135 |
| 923 | GGTGAATCACGTACAAACATG | 3416 | GESRTNM | 4659 | 105.119 |
| 924 | ATTTTGCTTGCTCAGTCTGCT | 3417 | ILLAQSA | 4660 | 105.117 |
| 925 | TATAATAGGGATAATGGTTCT | 3418 | YNRDNGS | 4661 | 105.083 |
| 926 | TGGAATAGTCCGGGTGAGGCG | 3419 | WNSPGEA | 4662 | 105.053 |
| 927 | CTGTTGGGGGCTCATCAGCCG | 3420 | LLGAHQP | 4663 | 105.052 |
| 928 | ATTGGTAAGGATAGTGTTCCG | 3421 | IGKDSVP | 4664 | 105.044 |
| 929 | ACGCGGGAGAGTCTGGTGGAT | 3422 | TRESLVD | 4665 | 105.022 |
| 930 | GCCTCTAACCACCTACAAGCC | 3423 | ASNHLQA | 4666 | 105.013 |
| 931 | AATCTTCAGACGGGTAAGGCT | 3424 | NLQTGKA | 4667 | 104.976 |
| 932 | ACTGTAGGATCCTCATACGCT | 3425 | TVGSSYA | 4668 | 104.9737 |
| 933 | GACACTAACGGAATAAAATCA | 3426 | DTNGIKS | 4669 | 104.968 |
| 934 | AGTCTGCGGATGGAGAATAGT | 3427 | SLRMENS | 4670 | 104.957 |
| 935 | ACTAAGGGTAATAATCTGGTT | 3428 | TKGNNLV | 4671 | 104.92 |
| 936 | CATACGAATCAGATGCAGCCT | 3429 | HTNQMQP | 4672 | 104.919 |
| 937 | AACGGCAACTACGACGGCGCG | 3430 | NGNYDGA | 4673 | 104.912 |
| 938 | GAGGCGCATAATCGTGGTAAT | 3431 | EAHNRGN | 4674 | 104.898 |
| 939 | GGGACGGTTAACTCAAGTGCA | 3432 | GTVNSSA | 4675 | 104.861 |
| 940 | GGGCCGACGATGAATCATAAT | 3433 | GPTMNHN | 4676 | 104.854 |
| 941 | GTACCCAACAACAACACTTCG | 3434 | VPNNNTS | 4677 | 104.834 |
| 942 | GTTTCTAACAAATCTGGAAGT | 3435 | VSNKSGS | 4678 | 104.818 |
| 943 | TGGGGAGTCAGTAACTCAGCA | 3436 | WGVSNSA | 4679 | 104.795 |
| 944 | GTCTCTAACGTCCTCTACAGC | 3437 | VSNVLYS | 4680 | 104.772 |
| 945 | GCCGGCCAAAACAGTGTGGGC | 3438 | AGQNSVG | 4681 | 104.77 |
| 946 | GGTACGAGTCTGGAGAATAGG | 3439 | GTSLENR | 4682 | 104.754 |
| 947 | CAGATGAATATTCATGATAAG | 3440 | QMNIHDK | 4683 | 104.736 |
| 948 | CCTCAACTAAGCGGCACAGCG | 3441 | PQLSGTA | 4684 | 104.733 |
| 949 | AGTTCGACTCCGCAGGATACT | 3442 | SSTPQDT | 4685 | 104.713 |
| 950 | GTGCAGGGGCAGACCGGCTGG | 3443 | VQGQTGW | 4686 | 104.688 |
| 951 | GGTCTGACGGGTGATTTGGTT | 3444 | GLTGDLV | 4687 | 104.682 |
| 952 | AACCACCCCGCACCAAGCTCA | 3445 | NHPAPSS | 4688 | 104.679 |
| 953 | AAAGAAAAAACCACCCGCGAA | 3446 | KEKTTRE | 4689 | 104.665 |
| 954 | ACTACTAATCCGCAGACGCAG | 3447 | TTNPQTQ | 4690 | 104.663 |
| 955 | GGAGGTGAACACGCAAGAAAC | 3448 | GGEHARN | 4691 | 104.66 |
| 956 | ACGACCGAAGCTGTTGTAGCA | 3449 | TTEAVVA | 4692 | 104.656 |
| 957 | CAAAACAGTGACCTCGCCAGC | 3450 | QNSDLAS | 4693 | 104.638 |
| 958 | TACTCTACAGAAGCACGAGTC | 3451 | YSTEARV | 4694 | 104.609 |
| 959 | ACCGGACAAGCGGGCGGATCG | 3452 | TGQAGGS | 4695 | 104.571 |
| 960 | ACTTCGTCTAATCTTTATGTG | 3453 | TSSNLYV | 4696 | 104.559 |
| 961 | ACGGCTCGTGCGATTGATATG | 3454 | TARAIDM | 4697 | 104.551 |
| 962 | CAGGAGTCTAATAGGGGGGTG | 3455 | QESNRGV | 4698 | 104.547 |
| 963 | AGTATCGGATTCTCAGTAGGC | 3456 | SIGFSVG | 4699 | 104.529 |
| 964 | GAGCGGAGTACGCATAATGTT | 3457 | ERSTHNV | 4700 | 104.513 |
| 965 | GCAAACCACGACAACATCGTG | 3458 | ANHDNIV | 4701 | 104.501 |
| 966 | TGGGCTATGAATAATGTGCCG | 3459 | WAMNNVP | 4702 | 104.498 |
| 967 | TATATTGCTGCGGGTGAGCAG | 3460 | YIAAGEQ | 4703 | 104.498 |
| 968 | AGTTCGAATACTTCTGGTAGT | 3461 | SSNTSGS | 4704 | 104.4928 |
| 969 | ATGGGGAAGCATGAGGGTCTT | 3462 | MGKHEGL | 4705 | 104.481 |
| 970 | GTGCTTACTCATCTGCCGACG | 3463 | VLTHLPT | 4706 | 104.4786 |
| 971 | GAAATGGGTAACCAATACCCA | 3464 | EMGNQYP | 4707 | 104.453 |
| 972 | AGTCTGCGTCCAACCCTACCT | 3465 | SLAPTLP | 4708 | 104.448 |
| 973 | TCGGCTAACTTATACAAACAA | 3466 | SANLYKQ | 4709 | 104.394 |
| 974 | CAAAACGACAGAAAACCGGAC | 3467 | QNDRKPD | 4710 | 104.391 |
| 975 | ATTATTTCGGGTATTACGGTG | 3468 | IISGITV | 4711 | 104.365 |
| 976 | CCATCCGAAATGAGGGCCGTA | 3469 | PSEMRAV | 4712 | 104.361 |
| 977 | TTGGTTACGCAGACGCCGAAT | 3470 | LVTQTPN | 4713 | 104.337 |
| 978 | ATTGCGCAGAATGAGACGTAT | 3471 | IAQNETY | 4714 | 104.336 |
| 979 | CCATACTTAAGAAACATGGCG | 3472 | PYLRNMA | 4715 | 104.321 |
| 980 | GGCGTGAACACAAAAATCGAA | 3473 | GVNTKIE | 4716 | 104.311 |
| 981 | TACTCTTCTGAAATGAGCGAA | 3474 | YSSEMSE | 4717 | 104.31 |
| 982 | TTAGAAAACCCAACACCAGCA | 3475 | LENPTPA | 4718 | 104.305 |
| 983 | GGTGTTATGTCTAATGCTACT | 3476 | GVMSNAT | 4719 | 104.289 |
| 984 | GCCCACACTGCATTAGCGGGG | 3477 | AHTALAG | 4720 | 104.27 |
| 985 | CCTGTTGTGAGGGATCGTTCT | 3478 | PVVRDRS | 4721 | 104.2336 |
| 986 | TCTGCGGGTATGGTGAGTCTG | 3479 | SAGMVSL | 4722 | 104.229 |
| 987 | TCGGGTGTTAATAGTGAGCGT | 3480 | SGVNSER | 4723 | 104.2093 |
| 988 | AATGGGGATGTTACTAATATG | 3481 | NGDVTNM | 4724 | 104.179 |
| 989 | TCTGTTGTGCCTACGGATAAG | 3482 | SVVPTDK | 4725 | 104.174 |
| 990 | AGTAAGGGTGATCAGCTTAAT | 3483 | SKGDQLN | 4726 | 104.166 |
| 991 | GACGGAGAATCCCGATTATCA | 3484 | DGESRLS | 4727 | 104.158 |
| 992 | GGTAATATGAATCATAGTATT | 3485 | GNMNHSI | 4728 | 104.15 |
| 993 | AGTGGGCATGCTTCTCAGGGT | 3486 | SGHASQG | 4729 | 104.148 |
| 994 | GGTTGGAGTAATAATGAGTTG | 3487 | GWSNNEL | 4730 | 104.145 |
| 995 | GGTGTGCATACTCATACTGTT | 3488 | GVHTHTV | 4731 | 104.139 |
| 996 | CACGTGACAGTAACGTTAAAC | 3489 | HVTVTLN | 4732 | 104.124 |
| 997 | ACCCGTGGCAACGACATATCA | 3490 | TRGNDIS | 4733 | 104.058 |
| 998 | AGCAAAGGCGGCGACATGGTT | 3491 | SKGGDMV | 4734 | 104.043 |
| 999 | ACGCATGGTGATCATATTCAG | 3492 | THGDHIQ | 4735 | 104.032 |
| 1000 | ACTACGAATTCTCATGCGATT | 3493 | TTNSHAI | 4736 | 104.021 |
| 1001 | GTCAGAACAGTCCTTCAACAA | 3494 | VRTVLQQ | 4737 | 104.017 |
| 1002 | ACTGTGCGTTCGCCTCAGCCG | 3495 | TVRSPQP | 4738 | 104.015 |
| 1003 | AATACTTATACTGCTGGTAAG | 3496 | NTYTAGK | 4739 | 104.005 |
| 1004 | ATTAGTAATCCGGAGAATACG | 3497 | ISNPENT | 4740 | 103.998 |
| 1005 | ATCGGGTCGCCGTTGGCCAAC | 3498 | IGSPLAN | 4741 | 103.928 |
| 1006 | TATACGGGTACTCTTGTTGTT | 3499 | YTGTLVV | 4742 | 103.911 |
| 1007 | GGGCGGCACACATTAGCGGAC | 3500 | GRHTLAD | 4743 | 103.908 |
| 1008 | ACTGATGGGCCGCGTCTGGCT | 3501 | TDGPRLA | 4744 | 103.881 |
| 1009 | GGGGCAGGAAACCTGGGTACC | 3502 | GAGNLGT | 4745 | 103.873 |
| 1010 | CTGATGAATCGTAATGCTCCT | 3503 | LMNRNAP | 4746 | 103.8648 |
| 1011 | AATGCTATGGCTTCTAGTAGG | 3504 | NAMASSR | 4747 | 103.826 |
| 1012 | CAGCATCGTGCGCAGGATGTG | 3505 | QHRAQDV | 4748 | 103.8248 |
| 1013 | AAAATAGAAAGCGGAACCATA | 3506 | KIESGTI | 4749 | 103.822 |
| 1014 | ACTAATTATCCTGAGGCGAAT | 3507 | TNYPEAN | 4750 | 103.806 |
| 1015 | GTATACCACGGGGTAGCCAGC | 3508 | VYHGVAS | 4751 | 103.803 |
| 1016 | TCCAACGTCCACGTAGTAAAC | 3509 | SNVHVVN | 4752 | 103.791 |
| 1017 | ACATACACCGACGGGAACCCC | 3510 | TYTDGNP | 4753 | 103.788 |
| 1018 | TTTATTGCGAATACGAATCCT | 3511 | FIANTNP | 4754 | 103.787 |
| 1019 | GACGCCGGGTACGGCCACGAC | 3512 | DAGYGHD | 4755 | 103.785 |
| 1020 | GGTCTTAGTCGGAATGATGGT | 3513 | GLSRNDG | 4756 | 103.783 |
| 1021 | ATGATGGGCGCGACAACGAAA | 3514 | MMGATTK | 4757 | 103.779 |
| 1022 | CCCATCAACGTACTCACGACA | 3515 | PINVLTT | 4758 | 103.771 |
| 1023 | GCCGTAGACCAATCACGTTTG | 3516 | AVDQSRL | 4759 | 103.765 |
| 1024 | AACGCTTCTACCTACATGGAC | 3517 | NASTYMD | 4760 | 103.728 |
| 1025 | ACACAAGCAGGTCTTGCGTCA | 3518 | TQAGLAS | 4761 | 103.696 |
| 1026 | GCACAATTCGAATCAGGCCGA | 3519 | AQFESGR | 4762 | 103.693 |
| 1027 | CGGAATGGTGGTACTACGGAT | 3520 | RNGGTTD | 4763 | 103.669 |
| 1028 | GCTAATACGTATAATGTTCAG | 3521 | ANTYNVQ | 4764 | 103.64 |
| 1029 | TCGGGTGTTCATAGTGAGCGT | 3522 | SGVHSER | 4765 | 103.636 |
| 1030 | AACACCGGCACCACGAGTGTC | 3523 | NTGTTSV | 4766 | 103.635 |
| 1031 | AGTACGAGTAATAGTCATATG | 3524 | STSNSHM | 4767 | 103.632 |
| 1032 | GGTGAACAACACAACGCCCCC | 3525 | GEQHNAP | 4768 | 103.629 |
| 1033 | GCTCATCATATGACGACGGAG | 3526 | AHHMTTE | 4769 | 103.614 |
| 1034 | TTGATGACTGGTACTGCGTCG | 3527 | LMTGTAS | 4770 | 103.575 |
| 1035 | GCTGCCGGAGCCGACTCTCCA | 3528 | AAGADSP | 4771 | 103.568 |
| 1036 | GTGTCTCTGAGTTCGCCTCCG | 3529 | VSLSSPP | 4772 | 103.563 |
| 1037 | CGTGTTGTAGCCGGTCCCAAC | 3530 | RVVAGPN | 4773 | 103.534 |
| 1038 | GATAAGACTGAGATGCTGCAG | 3531 | DKTEMLQ | 4774 | 103.525 |
| 1039 | GCACGAGACGACACGATACAA | 3532 | ARDDTIQ | 4775 | 103.523 |
| 1040 | TTACACCTTGGGTTATCATCT | 3533 | LHLGLSS | 4776 | 103.513 |
| 1041 | CTCGAAGGACAACGGGACGTC | 3534 | LEGQRDV | 4777 | 103.505 |
| 1042 | GCGTCGTTGTCGGCTCCGGCG | 3535 | ASLSAPA | 4778 | 103.5036 |
| 1043 | AGCAACCCTGGGAACCACAAC | 3536 | SNPGNHN | 4779 | 103.502 |
| 1044 | GGGCTGAATTCTAAGGGGACT | 3537 | GLNSKGT | 4780 | 103.471 |
| 1045 | AAAACACCCTCAGCTTCAGAA | 3538 | KTPSASE | 4781 | 103.47 |
| 1046 | GTGCTGGCGTCGACTGAGAAG | 3539 | VLASTEK | 4782 | 103.451 |
| 1047 | TCGGTATTGAACAAACCAACA | 3540 | SVLNKPT | 4783 | 103.441 |
| 1048 | CCCGGTAACGGACAAAGTCCG | 3541 | PGNGQSP | 4784 | 103.396 |
| 1049 | ATCTTGATGGGCGCTAGGACA | 3542 | ILMGART | 4785 | 103.385 |
| 1050 | GCACTACCATCCCACTCCTCC | 3543 | ALPSHSS | 4786 | 103.382 |
| 1051 | AGGGATCAGACTCATCCGAAT | 3544 | RDQTHPN | 4787 | 103.378 |
| 1052 | TCTGGTCCGATTCCTGCTGTT | 3545 | SGPIPAV | 4788 | 103.376 |
| 1053 | TACGTGGACGACAACAGTCGC | 3546 | YVDDNSR | 4789 | 103.35 |
| 1054 | TTGACTCGGGGGGTCGCCGCA | 3547 | LTRGVAA | 4790 | 103.334 |
| 1055 | TCTGAGAAGGAGGCTCGGCTG | 3548 | SEKEARL | 4791 | 103.326 |
| 1056 | TCCACAACGCCTCCCTTCAAA | 3549 | STTPPFK | 4792 | 103.308 |
| 1057 | TACTCGACAACCATGCTTAAC | 3550 | YSTTMLN | 4793 | 103.299 |
| 1058 | AAAAACGGTGTTATAAACGAC | 3551 | KNGVIND | 4794 | 103.292 |
| 1059 | TTCGGTATAGGGCACGGAACA | 3552 | FGIGHGT | 4795 | 103.278 |
| 1060 | CCTCTTCATGTTGCTTCTCCT | 3553 | PLHVASP | 4796 | 103.245 |
| 1061 | TTGGGTAATGGTAGTTCTTTG | 3554 | LGNGSSL | 4797 | 103.239 |
| 1062 | AGTGGCAACGCGAACATAGTA | 3555 | SGNANIV | 4798 | 103.225 |
| 1063 | GGGATTAATCGTACTAGTGAG | 3556 | GINRTSE | 4799 | 103.19 |
| 1064 | TCGGATAATAGGAATACTGCG | 3557 | SDNRNTA | 4800 | 103.19 |
| 1065 | CGATTAGGAACCGTCACCAAC | 3558 | RLGTVTN | 4801 | 103.189 |
| 1066 | GTGGAGCATGTTGCTCATCAG | 3559 | VEHVAHQ | 4802 | 103.185 |
| 1067 | TATACTAAGCATCCTGTTGAG | 3560 | YTKHPVE | 4803 | 103.172 |
| 1068 | TCCCGAATCACGGTGAACGCA | 3561 | SRITVNA | 4804 | 103.154 |
| 1069 | ACAGTATCGTCATACGTACAA | 3562 | TVSSYVQ | 4805 | 103.134 |
| 1070 | CGCGCCGAAGGGAGCTCTGGC | 3563 | RAEGSSG | 4806 | 103.127 |
| 1071 | GCTGTGGGGCGGTCGGATGAT | 3564 | AVGRSDD | 4807 | 103.119 |
| 1072 | CGCATAGGCGTTGGAGCACCA | 3565 | RIGVGAP | 4808 | 103.113 |
| 1073 | TACTCAAACCTCGTACTTTCC | 3566 | YSNLVLS | 4809 | 103.095 |
| 1074 | TCGACGAATTCTGAGGCGGTT | 3567 | STNSEAV | 4810 | 103.068 |
| 1075 | GCAATGTCAACCCACATGATA | 3568 | AMSTHMI | 4811 | 103.067 |
| 1076 | AGGGTTGATATTTCGCATTTT | 3569 | RVDISHF | 4812 | 103.049 |
| 1077 | ATTCTTACGCCTTTGGATAAG | 3570 | ILTPLDK | 4813 | 103.039 |
| 1078 | GTTGCGAGTACGACGCAGACT | 3571 | VASTTQT | 4814 | 103.033 |
| 1079 | GACCGTAGCTCCGCGACGCTC | 3572 | DRSSATL | 4815 | 103.014 |
| 1080 | GATCATAGTGAGCAGAATTCG | 3573 | DHSEQNS | 4816 | 102.995 |
| 1081 | ATACGCAGCGAATTGGAAGTA | 3574 | IRSELEV | 4817 | 102.969 |
| 1082 | GCGAATCTGGGTGATGTTGAG | 3575 | ANLGDVE | 4818 | 102.969 |
| 1083 | GAGCTTAAGGAGAGTCAGAAG | 3576 | ELKESQK | 4819 | 102.956 |
| 1084 | TCATACACAGCAGGAAGACCC | 3577 | SYTAGRP | 4820 | 102.953 |
| 1085 | GGACCAGCCTACAACCAAAGC | 3578 | GPAYNQS | 4821 | 102.924 |
| 1086 | CATGAGAGTCATTATGTTAGT | 3579 | HESHYVS | 4822 | 102.921 |
| 1087 | AATGGTAAGCTGGGTACGACT | 3580 | NGKLGTT | 4823 | 102.921 |
| 1088 | CTTCCGCCTGCGTCGGCGGGT | 3581 | LPPASAG | 4824 | 102.917 |
| 1089 | TTGTCGTATCAGACTGGTCAT | 3582 | LSYQTGH | 4825 | 102.916 |
| 1090 | GACAGCCAAATCACAAGACTA | 3583 | DSQITRL | 4826 | 102.909 |
| 1091 | AACGTATACGAAGGGCACCGC | 3584 | NVYEGHR | 4827 | 102.909 |
| 1092 | TTGTTTACTGCTGGGAGTACT | 3585 | LFTAGST | 4828 | 102.863 |
| 1093 | CTTGTGAATAATGATGGGACT | 3586 | LVNNDGT | 4829 | 102.861 |
| 1094 | GCGATGAATGTGCGGAGTGAT | 3587 | AMNVRSD | 4830 | 102.858 |
| 1095 | GCCAGCCTTGACCGCCTTCCA | 3588 | ASLDRLP | 4831 | 102.857 |
| 1096 | GGCTCTCGGAACGGACCCACA | 3589 | GSRNGPT | 4832 | 102.8532 |
| 1097 | ATGAGTGATGGGCATTCGAAG | 3590 | MSDGHSK | 4833 | 102.833 |
| 1098 | TCTAACCGTACGGAAATGCCA | 3591 | SNRTEMF | 4834 | 102.815 |
| 1099 | AACGTGGTGAAAAACAACACA | 3592 | NVVKNNT | 4835 | 102.801 |
| 1100 | GTGGTCGACTCAACATACCCG | 3593 | VVDSTYP | 4836 | 102.793 |
| 1101 | GTGGCTGGGGGGACTTCGGAG | 3594 | VAGGTSE | 4837 | 102.789 |
| 1102 | CGGGCAGACATGACTCCCTTA | 3595 | RADMTPL | 4838 | 102.77 |
| 1103 | GGACACGAACAAACTGACGCA | 3596 | GHEQTDA | 4839 | 102.764 |
| 1104 | AGTGCTTTGATTAGTGTGGTT | 3597 | SALISVV | 4840 | 102.756 |
| 1105 | AACTCGACAACGGCACAATCA | 3598 | NSTTAQS | 4841 | 102.75 |
| 1106 | TACGGCGACCTAACTACAGTC | 3599 | YGDLTTV | 4842 | 102.737 |
| 1107 | GCACGCAACGACGGACAAGGA | 3600 | ARNDGQG | 4843 | 102.734 |
| 1108 | CTGAACGTTAGTTCATCCAAA | 3601 | LNVSSSK | 4844 | 102.693 |
| 1109 | TCTGGCGTCTCGAAAGAACGG | 3602 | SGVSKER | 4845 | 102.692 |
| 1110 | AACATGGAACACACCATGGCG | 3603 | NMEHTMA | 4846 | 102.687 |
| 1111 | GCTCGTCCGGCTTCGTCTGAT | 3604 | ARPASSD | 4847 | 102.6705 |
| 1112 | CTTAGGGAAGAATCTGCACGT | 3605 | LREESAR | 4848 | 102.639 |
| 1113 | TTGGCCAACATGTCCGCACCA | 3606 | LANMSAP | 4849 | 102.61 |
| 1114 | AACCACACGGTAGAAGGACGC | 3607 | NHTVEGR | 4850 | 102.598 |
| 1115 | CCTCAGCATCAGCATGAGCAT | 3608 | PQHQHEH | 4851 | 102.582 |
| 1116 | AATTCTTCGGAGCTGAAGACG | 3609 | NSSELKT | 4852 | 102.564 |
| 1117 | CTTGTTGCTGAGCGTTTGCCG | 3610 | LVAERLP | 4853 | 102.552 |
| 1118 | AACGTTATGCACTCTTCCTCC | 3611 | NVMHSSS | 4854 | 102.525 |
| 1119 | GCGAGTGATAAGGGGGCGAAT | 3612 | ASDKGAN | 4855 | 102.509 |
| 1120 | AGTCTGGATCGGAAGCCTCCG | 3613 | SLDRKPP | 4856 | 102.5032 |
| 1121 | ACAGAACACGAAAAATCCACT | 3614 | TEHEKST | 4857 | 102.459 |
| 1122 | CCTCATAATCAGGAGATGGGT | 3615 | PHNQEMG | 4858 | 102.449 |
| 1123 | GAGTCTAAGACTGTGGTTATT | 3616 | ESKTVVI | 4859 | 102.442 |
| 1124 | TCGACGGGCCAAAACTTAAAA | 3617 | STGQNLK | 4860 | 102.442 |
| 1125 | GTTCTTCATGTTTCTGATGTT | 3618 | VLHVSDV | 4861 | 102.441 |
| 1126 | CCTGACGCAGCGCGTAGCCCG | 3619 | PDAARSP | 4862 | 102.421 |
| 1127 | GCTCCTCGGCATGCTCATCCT | 3620 | APRHAHP | 4863 | 102.414 |
| 1128 | CATGTGAATCCTACGCCGGCG | 3621 | HVNPTPA | 4864 | 102.401 |
| 1129 | TTGCCTAATGAGCGTCCGGGT | 3622 | LPNERPG | 4865 | 102.397 |
| 1130 | GAGGCTAAGGGTTTTGGTCAT | 3623 | EAKGFGH | 4866 | 102.395 |
| 1131 | TCAGAAAACACCTCTGTACCC | 3624 | SENTSVP | 4867 | 102.388 |
| 1132 | GGTCCCGGAGAAAACTACCGA | 3625 | GPGENYR | 4868 | 102.375 |
| 1133 | TCTCATGAGATGAATAATGGT | 3626 | SHEMNNG | 4869 | 102.366 |
| 1134 | GTAGACACCTACAGCGGTCTG | 3627 | VDTYSGL | 4870 | 102.35 |
| 1135 | GGAGTCCTAGGAAACATGGTA | 3628 | GVLGNMV | 4871 | 102.325 |
| 1136 | GCGCTGGATAATAGTAGTCGG | 3629 | ALDNSSR | 4872 | 102.322 |
| 1137 | TTTCTGGGTTCTAGTAATCAT | 3630 | FLGSSNH | 4873 | 102.321 |
| 1138 | CCTGTGGTTCATGGTGAGCCT | 3631 | PVVHGEP | 4874 | 102.3142 |
| 1139 | CGCAGGGAAGGTATCCTAATG | 3632 | RREGILM | 4875 | 102.305 |
| 1140 | CAGCAGGGGGCGCCTACTTCT | 3633 | QQGAPTS | 4876 | 102.303 |
| 1141 | AAGGTTAGTGGTGGGGAGACG | 3634 | KVSGGET | 4877 | 102.275 |
| 1142 | GCGAAACACGAAAGCTCGTCT | 3635 | AKHESSS | 4878 | 102.272 |
| 1143 | ATTCTTATGGGTGCGCGTACT | 3636 | ILMGART | 4879 | 102.235 |
| 1144 | ACGCTAGGCAGCAGCAGCACC | 3637 | TLGSSST | 4880 | 102.222 |
| 1145 | CTAAGATCTGAACCGACACAA | 3638 | LRSEPTQ | 4881 | 102.218 |
| 1146 | CGCTCGGAACAAAAAACTCCG | 3639 | RSEQKTP | 4882 | 102.207 |
| 1147 | CACGCTCCAAGCGGCGCCATA | 3640 | HAPSGAI | 4883 | 102.2 |
| 1148 | AGTAGTGTTACTTCGAGGGAG | 3641 | SSVTSRE | 4884 | 102.197 |
| 1149 | GTGAATCCGCATCCTGCGCAG | 3642 | VNPHPAQ | 4885 | 102.185 |
| 1150 | CAATACTCGATGGACACGCGC | 3643 | QYSMDTR | 4886 | 102.173 |
| 1151 | ACTCCTGGTGTTACTAGGACG | 3644 | TPGVTRT | 4887 | 102.172 |
| 1152 | CTTTATGAGGTTGGTACTCCT | 3645 | LYEVGTP | 4888 | 102.165 |
| 1153 | ACGATGACGAGTGAGCTTTCG | 3646 | TMTSELS | 4889 | 102.16 |
| 1154 | TCAGGTTCGGAATACCGTACC | 3647 | SGSEYRT | 4890 | 102.153 |
| 1155 | GAAATGCAAACCAAAAACGCC | 3648 | EMQTKNA | 4891 | 102.144 |
| 1156 | GGCCACGAAAACATGGGCGTG | 3649 | GHENMGV | 4892 | 102.135 |
| 1157 | GGGGCGCATACGTCGGCTTCG | 3650 | GAHTSAS | 4893 | 102.116 |
| 1158 | GCTGATACGCTGCTGCGTAGG | 3651 | ADTLLRR | 4894 | 102.095 |
| 1159 | GACAACAGCAACAACGTCCCA | 3652 | DNSNNVP | 4895 | 102.092 |
| 1160 | ATGACTGCTAACTTGGTGGAA | 3653 | MTANLVE | 4896 | 102.076 |
| 1161 | GAAGCGGGACGCACGCTTCAA | 3654 | EAGRTLQ | 4897 | 102.07 |
| 1162 | AGACACGTCGTCCCCGACTCC | 3655 | RHVVPDS | 4898 | 102.039 |
| 1163 | GTGAGTTCTGAGCAGTATAGG | 3656 | VSSEQYR | 4899 | 102.03 |
| 1164 | GGTATCGAAGCAAGTCGCGGA | 3657 | GIEASRG | 4900 | 102.008 |
| 1165 | AGACAAGGCGTGAACGGAGTA | 3658 | RQGVNGV | 4901 | 101.991 |
| 1166 | ACTGTGATGATGAGTACGAGG | 3659 | TVMMSTR | 4902 | 101.976 |
| 1167 | TGGCAAGACCACAACAAAGTC | 3660 | WQDHNKV | 4903 | 101.948 |
| 1168 | GGAATCACAGGATCAACAGGA | 3661 | GITGSTG | 4904 | 101.943 |
| 1169 | AATTATGCTCAGAGGGATGGT | 3662 | NYAQRDG | 4905 | 101.936 |
| 1170 | AAACAAGAAGCTCTGTCCTCA | 3663 | KQEALSS | 4906 | 101.872 |
| 1171 | TCAACTTTAGACCGAAGCGAA | 3664 | STLDRSE | 4907 | 101.8665 |
| 1172 | GCGATTACGAATACGCAGCAG | 3665 | AITNTQQ | 4908 | 101.8615 |
| 1173 | AGGCTGGCGACTCAGAGTGCT | 3666 | RLATQSA | 4909 | 101.847 |
| 1174 | TGGCAGCTTACGACGAGTCAT | 3667 | WQLTTSH | 4910 | 101.775 |
| 1175 | GGTGGTAGTGGTTCTAATACT | 3668 | GGSGSNT | 4911 | 101.759 |
| 1176 | AACTTAGTAGCGTACACGAAA | 3669 | NLVAYTK | 4912 | 101.732 |
| 1177 | AAGGCTTCGCATGATACTAGT | 3670 | KASHDTS | 4913 | 101.721 |
| 1178 | GCCATAACGATAATAGGCACT | 3671 | AITIIGT | 4914 | 101.711 |
| 1179 | AACGCATCGTCGGACCGCTTC | 3672 | NASSDRF | 4915 | 101.686 |
| 1180 | GAAACGCAACGTATCGAACTG | 3673 | ETQRIEL | 4916 | 101.636 |
| 1181 | GTGATTGAGGTTAATTCGCGT | 3674 | VIEVNSR | 4917 | 101.614 |
| 1182 | GATAGGGATATGGAGGGTGTT | 3675 | DRDMEGV | 4918 | 101.609 |
| 1183 | ATTTCGGAGATGACGCGGTAT | 3676 | ISEMTRY | 4919 | 101.59 |
| 1184 | GAGCATGATGTGAGTACGCGT | 3677 | EHDVSTR | 4920 | 101.539 |
| 1185 | CGTATGGAGGAGACTGCTTAT | 3678 | RMEETAY | 4921 | 101.533 |
| 1186 | TATAGTACTGATCTTAGGATG | 3679 | YSTDLRM | 4922 | 101.52 |
| 1187 | GTGCCTGAGCCTAAGAAGGCG | 3680 | VPEPKKA | 4923 | 101.495 |
| 1188 | ACTTATGCGCCTAGGTCGCCT | 3681 | TYAPRSP | 4924 | 101.484 |
| 1189 | GCTGCGGCTTCGCCTTTGGCT | 3682 | AAASPLA | 4925 | 101.484 |
| 1190 | AGTGGGACGTATGCTAGTCGT | 3683 | SGTYASR | 4926 | 101.456 |
| 1191 | ACTGAAGCATCAATCGCGGCG | 3684 | TEASIAA | 4927 | 101.456 |
| 1192 | CGCATCGTAGACACGTTGGGA | 3685 | RIVDTLG | 4928 | 101.447 |
| 1193 | TATCTGCAGGAGAAGTTTCCT | 3686 | YLQEKFP | 4929 | 101.437 |
| 1194 | GTTCATGATCAGGGGGCTGGG | 3687 | VHDQGAG | 4930 | 101.436 |
| 1195 | CCCCAAGCCACTCTCAACAAC | 3688 | PQATLNN | 4931 | 101.432 |
| 1196 | TGCGGAATGTCCGAATGCTCG | 3689 | CGMSECS | 4932 | 101.429 |
| 1197 | GGTTCGCACAACGGGCCGACA | 3690 | GSHNGPT | 4933 | 101.429 |
| 1198 | TTTGGGTCTGGGCCGAATCTT | 3691 | FGSGPNL | 4934 | 101.413 |
| 1199 | ATGGATACGAATACGCATCGT | 3692 | MDTNTHR | 4935 | 101.411 |
| 1200 | AAGAATAATCCTGAGGATGGT | 3693 | KNNPEDG | 4936 | 101.41 |
| 1201 | CTGCCTACGGCTACTGGTCAG | 3694 | LPTATGQ | 4937 | 101.406 |
| 1202 | ACGGCTGAGCGTACTGAGTAT | 3695 | TAERTEY | 4938 | 101.383 |
| 1203 | AACTACAGGGACATCACAATG | 3696 | NYRDITM | 4939 | 101.375 |
| 1204 | CCCGCGAGAAGCGACGCCCTT | 3697 | PARSDAL | 4940 | 101.359 |
| 1205 | TCCGTTGTAACTCTTGGGGTG | 3698 | SVVTLGV | 4941 | 101.324 |
| 1206 | GTTGTTAAGGAGATTAAGCTG | 3699 | VVKEIKL | 4942 | 101.324 |
| 1207 | GACCACTCGAAACAAAACTCT | 3700 | DHSKQNS | 4943 | 101.293 |
| 1208 | CAGTCTAATTTGGTTATTAAT | 3701 | QSNLVIN | 4944 | 101.292 |
| 1209 | ATTCCGGTTGGGGCGATGGCT | 3702 | IPVGAMA | 4945 | 101.286 |
| 1210 | ACGTCGGAGATGCGTACTGCT | 3703 | TSEMRTA | 4946 | 101.255 |
| 1211 | GGTAGTCAGCGTGCTATGAAT | 3704 | GSQRAMN | 4947 | 101.251 |
| 1212 | CACCTGTCACAAGCAAACCAC | 3705 | HLSQANH | 4948 | 101.24 |
| 1213 | GGAGGGAACTCCCACGGGGTA | 3706 | GGNSHGV | 4949 | 101.219 |
| 1214 | GTGACTCGTAGTACGAAGGAG | 3707 | VTRSTKE | 4950 | 101.178 |
| 1215 | ATGCTCAGAGCAAGCACCGCC | 3708 | MLRASTA | 4951 | 101.171 |
| 1216 | GGCAGGCAAATACCAGAACAA | 3709 | GRQIPEQ | 4952 | 101.146 |
| 1217 | TGGAATCAGAATGTGTCTCAT | 3710 | WNQNVSH | 4953 | 101.125 |
| 1218 | CAGCGGGGGGAGCTTCCTGCG | 3711 | QRGELPA | 4954 | 101.114 |
| 1219 | GCGAATGATAGTTTGCGTTCT | 3712 | ANDSLRS | 4955 | 101.079 |
| 1220 | AACATGCCACCGGAATCGCAC | 3713 | NMPPESH | 4956 | 101.037 |
| 1221 | AATTTGAGTCTTCAGAGTCTG | 3714 | NLSLQSL | 4957 | 101.03 |
| 1222 | ACATCAGACGGTCTACTAAGT | 3715 | TSDGLLS | 4958 | 101.028 |
| 1223 | GCGGGCCAAGCGTACCAATCC | 3716 | AGQAYQS | 4959 | 101.016 |
| 1224 | CTGAGTGTGAAGGAGGAGATT | 3717 | LSVKEEI | 4960 | 101.007 |
| 1225 | GATAATAGTCCTGCTAATCAT | 3718 | DNSPANH | 4961 | 100.9812 |
| 1226 | ATGCACAACCTACCCTCATAC | 3719 | MHNLPSY | 4962 | 100.9629 |
| 1227 | TACCAAGCCTCAAACAACAGT | 3720 | YQASNNS | 4963 | 100.9594 |
| 1228 | GCGCGGGCAGAAGGGGTCTTC | 3721 | ARAEGVF | 4964 | 100.9325 |
| 1229 | GGCCGAGAAGGAAACCTACCA | 3722 | GREGNLP | 4965 | 100.913 |
| 1230 | CAAGCTGCAGAAAGGGACAGA | 3723 | QAAERDR | 4966 | 100.8877 |
| 1231 | GTTGAGAATAATCGTATGAGT | 3724 | VENNRMS | 4967 | 100.8183 |
| 1232 | AATATGTCGCATAGTACTCTG | 3725 | NMSHSTL | 4968 | 100.7704 |
| 1233 | TCTTCGTTGGGTCTTGCTCCG | 3726 | SSLGLAP | 4969 | 100.7249 |
| 1234 | AACGTCGCTCCCTACAGTAGC | 3727 | NVAPYSS | 4970 | 100.7069 |
| 1235 | AGGCCTGCGCAGCTGCCTGAG | 3728 | RPAQLPE | 4971 | 100.615 |
| 1236 | ATGTCGGGTTCTGGGAACGCA | 3729 | MSGSGNA | 4972 | 100.597 |
| 1237 | CACGGGGGGGAACACCGGAAC | 3730 | HGGEHRN | 4973 | 100.5793 |
| 1238 | GCATCCGGCGCACGCTACGTC | 3731 | ASGARYV | 4974 | 100.5302 |
| 1239 | CAAAACCACGCGTCTGGTGAA | 3732 | QNHASGE | 4975 | 100.499 |
| 1240 | GCACACCAAAAAGACCTACGC | 3733 | AHQKDLR | 4976 | 100.4529 |
| 1241 | TTTGGGAAGGTTGGTACTGCT | 3734 | FGKVGTA | 4977 | 100.433 |
| 1242 | CTGCAGAAGTCGACTCTGGCT | 3735 | LQKSTLA | 4978 | 100.3439 |
| 1243 | ATTCATAATGAGTCTTATGGT | 3736 | IHNESYG | 4979 | 100.15 |

TABLE 3
MHCK7/CK8 Combined Results mRNA Second Round of Capsid
Variant Selection in C57BL6 mice-score capped at 100

| Variant ID | | SEQ | Amino | SEQ | Sum of muscle mRNA |
|---|---|---|---|---|---|
| for Table | Nucleotide Sequence | ID NO: | Acid seq. | ID NO: | score_capped at 100 |
| 1 | AGGGGTGATCTTTCTACGCCT | 4980 | RGDLSTP | 6647 | 856.3525 |
| 2 | AGAGGCGACTTATCCACACCC | 4981 | RGDLSTP | 6648 | 732.672 |
| 3 | AGAGGAGACTTGACAACCCCA | 4982 | RGDLTTP | 6649 | 683.373 |
| 4 | AGGGGCGACCTGAACCAATAC | 4983 | RGDLNQY | 6650 | 680.6265 |
| 5 | CGGGGTGATCAGCTTTATCAT | 4984 | RGDQLYH | 6651 | 624.3915 |
| 6 | AGGGGGGATGCGACGGAGCTT | 4985 | RGDATEL | 6652 | 620.5 |
| 7 | CGAGGAGACACCATGAGCAAA | 4986 | RGDTMSK | 6653 | 599.497 |
| 8 | CGGGGTGATCTTAATCAGTAT | 4987 | RGDLNQY | 6654 | 579.731 |
| 9 | CGGGGTGATCTTACTACGCCT | 4988 | RGDLTTP | 6655 | 531.1525 |
| 10 | CGCGGCGACATGATAAACACC | 4989 | RGDMINT | 6656 | 528.2405 |
| 11 | CGGGGGGATACTATGTCTAAG | 4990 | RGDTMSK | 6657 | 469.5075 |
| 12 | CGAGGCGACACAATGAACTAC | 4991 | RGDTMNY | 6658 | 412.3247 |
| 13 | CGGGGTGACGCAACAGAATTG | 4992 | RGDATEL | 6659 | 408.0865 |
| 14 | CGTTTGGACCTGCAAGTCCAC | 4993 | RLDLQVH | 6660 | 397.178 |
| 15 | CGTGGTGATGTGGCGGCTAAG | 4994 | RGDVAAK | 6661 | 395.174 |
| 16 | AGGGGCGACCTCAACGACAGC | 4995 | RGDLNDS | 6662 | 360.4535 |
| 17 | CGTGGGGATTTGAATGATTCT | 4996 | RGDLNDS | 6663 | 349.6835 |
| 18 | TCTTATGGTAATACTCATGAT | 4997 | SYGNTHD | 6664 | 326.826 |
| 19 | CGTTTGGACCTGCAAGTCAAC | 4998 | RLDLQVN | 6665 | 317.78 |
| 20 | AAAGCGGGACAACTAGTGGAA | 4999 | KAGQLVE | 6666 | 317.023 |
| 21 | GATCAGACGGCTAGTATTGTT | 5000 | DQTASIV | 6667 | 313.224 |
| 22 | TATATTGCTGCGGGTGAGCAG | 5001 | YIAAGEQ | 6668 | 308.738 |
| 23 | GCGGTTGTTCTGAATAGTAAT | 5002 | AVVLNSN | 6669 | 307.8445 |
| 24 | TCTAAAGGAAACGAACAAATG | 5003 | SKGNEQM | 6670 | 305.016 |
| 25 | GCAAACCCCAACATACTAGAC | 5004 | ANPNILD | 6671 | 302.02 |
| 26 | CACAACAAACCAAACGGAGAC | 5005 | HNKPNGD | 6672 | 297.851 |
| 27 | GATAAGACTGAGATGCTGCAG | 5006 | DKTEMLQ | 6673 | 294.655 |
| 28 | ACAGAACAATCTTACTCACGA | 5007 | TEQSYSR | 6674 | 290.3555 |
| 29 | ACTGTGATGATGAGTACGAGG | 5008 | TVMMSTR | 6675 | 289.3945 |
| 30 | GTCTCTACATACCTCCTGGCA | 5009 | VSTYLLA | 6676 | 286.859 |
| 31 | CCTAATGTTACGCAGTCTTAT | 5010 | PNVTQSY | 6677 | 285.178 |
| 32 | ATGAGTAATTTGGGGTATGAG | 5011 | MSNLGYE | 6678 | 284 |
| 33 | ACGATGGGTGCTAATGGTACT | 5012 | TMGANGT | 6679 | 278.291 |
| 34 | AATGTTAATGCGCAGAGTAGG | 5013 | NVNAQSR | 6680 | 275.45 |
| 35 | GACCAAAACTTCGAACGTAGA | 5014 | DQNFERR | 6681 | 274.6045 |
| 36 | AACACGTACACACCGGGAAAA | 5015 | NTYTPGK | 6682 | 273.83545 |
| 37 | CGTGGGGATATGATTAATACG | 5016 | RGDMINT | 6683 | 270.333 |
| 38 | GCACAATTCGAATCAGGCCGA | 5017 | AQFESGR | 6684 | 267.7345 |
| 39 | ACGGCGTATCAGGCTGGTCTG | 5018 | TAYQAGL | 6685 | 267.054 |
| 40 | AGTGTTAGTTCTGTGGTGTTG | 5019 | SVSSVVL | 6686 | 266.91 |
| 41 | GGGCTTTCTAAGGCGTCTGAT | 5020 | GLSKASD | 6687 | 266.825 |
| 42 | TGGAACGGAAACGCCACACAA | 5021 | WNGNATQ | 6688 | 265.11 |
| 43 | ACAGCCGGCGGCGAACGCGCC | 5022 | TAGGERA | 6689 | 258.785 |
| 44 | TACACCTCTCAAACCAGCACT | 5023 | YTSQTST | 6690 | 258.1818 |
| 45 | GCGAACATAGAAAACACGTCA | 5024 | ANIENTS | 6691 | 257.015 |
| 46 | GAACTCTCCGTTCCGAAACCA | 5025 | ELSVPKP | 6692 | 255.133 |
| 47 | GATCCTGGTCGGACGGGTACG | 5026 | DPGRTGT | 6693 | 254.7 |
| 48 | GATCGTCCGAATAATATGACG | 5027 | DRPNNMT | 6694 | 254.383 |
| 49 | TATAGTACTGATCTTAGGATG | 5028 | YSTDLRM | 6695 | 252.146 |
| 50 | CAGTCGGTTAATAGTACGAGT | 5029 | QSVNSTS | 6696 | 251.508 |
| 51 | GCGGCACAACTCGTCAGTCCA | 5030 | AAQLVSP | 6697 | 250.413 |
| 52 | CTCGGAGGAAACAGCAGGTTC | 5031 | LGGNSRF | 6698 | 247.9775 |
| 53 | GCGACGCTGAATAATAGTTAT | 5032 | ATLNNSY | 6699 | 247.2955 |
| 54 | CGCTTGGACGTTGGAAGCCCG | 5033 | RLDVGSP | 6700 | 245.839 |
| 55 | TATCGGGGTAGGGAGGATTGG | 5034 | YRGREDW | 6701 | 244.83 |
| 56 | AGGGGAGATCTTTCTACGCCT | 5035 | RGDLSTP | 6702 | 243.25 |
| 57 | AGTGGTCTTTCGCATGGTCAG | 5036 | SGLSHGQ | 6703 | 242.486 |
| 58 | GAACACGCTACAGCAAAACAA | 5037 | EHATAKQ | 6704 | 241.816 |
| 59 | GGGGCGGAAGCGGGCCGCCAA | 5038 | GAEAGRQ | 6705 | 241.46345 |
| 60 | ATAAGCGGTTCCACTACACAC | 5039 | ISGSTTH | 6706 | 240.8811 |
| 61 | GGCACCGTCGTTCCGGGCTCC | 5040 | GTVVPGS | 6707 | 240.8455 |
| 62 | CATAATAATAATATGCTGAAT | 5041 | HNNNMLN | 6708 | 239.0755 |
| 63 | CGTCTGACTGATACTATGCAT | 5042 | RLTDTMH | 6709 | 238.939 |
| 64 | AACACCTACCCCTTCAACGCC | 5043 | NTYPFNA | 6710 | 235.89 |
| 65 | TCAACCACTACTGGCCACATG | 5044 | STTTGHM | 6711 | 231.581 |
| 66 | GTGCATAATCCTACTACTACG | 5045 | VHNPTTT | 6712 | 231.5537 |
| 67 | AATCTGCAGGTGAATGCGAAT | 5046 | NLQVNAN | 6713 | 231.172 |
| 68 | AGATACGGAGAATCCATCGAA | 5047 | RYGESIE | 6714 | 230.66 |
| 69 | AATACTACTCCGCCTAATCAT | 5048 | NTTPPNH | 6715 | 230.225 |
| 70 | AATACTTTGCAGAATAGTCAT | 5049 | NTLQNSH | 6716 | 229.0666 |
| 71 | AGTCTGAACAACATGGGATCG | 5050 | SLNNMGS | 6717 | 228.9154 |
| 72 | AGAAACGAAAACGTAAACGCT | 5051 | RNENVNA | 6718 | 228.828 |
| 73 | GCTGTGCATGCGACTAGTAGT | 5052 | AVHATSS | 6719 | 227.882 |
| 74 | ACCCAACACCTACCATCCACA | 5053 | TQHLPST | 6720 | 227.0845 |
| 75 | AGTGTGTTGTCTCAGGCTAAT | 5054 | SVLSQAN | 6721 | 225.4035 |
| 76 | AGTAGCTCAACTGAAGGGCAA | 5055 | SSSTEGQ | 6722 | 224.971 |
| 77 | GGTCGGACGGATACTCCTAAT | 5056 | GRTDTPN | 6723 | 224.945 |
| 78 | GTTCAAACCCACATAGGAGTC | 5057 | VQTHIGV | 6724 | 224.616 |
| 79 | ACTTCTGCTAGTGAGAATTGG | 5058 | TSASENW | 6725 | 224.608 |
| 80 | GGAAAAGCCAACGACGGTTCT | 5059 | GKANDGS | 6726 | 224.5935 |
| 81 | GTGGAGCGGAATACTGATATG | 5060 | VERNTDM | 6727 | 223.9975 |
| 82 | CAAAACCACGCGTCTGGTGAA | 5061 | QNHASGE | 6728 | 223.871 |
| 83 | TATTATGAGAAGCTTAGTGCG | 5062 | YYEKLSA | 6729 | 222.1725 |
| 84 | TTCATCGCTAACACTAACCCA | 5063 | FIANTNP | 6730 | 221.76 |
| 85 | ACCTCCACGGCTTCAAAACAA | 5064 | TSTASKQ | 6731 | 221.617 |
| 86 | AATAATGATAATGGTTTTGTT | 5065 | NNDNGFV | 6732 | 220.61 |
| 87 | GCTAATTCTATTGGGGGTCCG | 5066 | ANSIGGP | 6733 | 220.304 |
| 88 | ACTGGCCAATTAGTAGGAACC | 5067 | TGQLVGT | 6734 | 220.262 |
| 89 | TACAGTCAATCGCTGTCTGAA | 5068 | YSQSLSE | 6735 | 220.02 |
| 90 | GTCTACAACGGCAACGTAGTA | 5069 | VYNGNVV | 6736 | 219.824 |
| 91 | AACTCGGCTGAATCCTCGAGA | 5070 | NSAESSR | 6737 | 219.5415 |
| 92 | ACGCGTAATTTGTCTGAGAGT | 5071 | TRNLSES | 6738 | 218.919 |
| 93 | TCTATGTCTGATGGGCTTCGG | 5072 | SMSDGLR | 6739 | 218.868 |
| 94 | GTAGGCGACCAATCCCGCCCG | 5073 | VGDQSRP | 6740 | 218.8565 |
| 95 | TTTACGGTGAATCAGGATCTT | 5074 | FTVNQDL | 6741 | 218.069 |
| 96 | TATCATAAGTATAGTACGGAT | 5075 | YHKYSTD | 6742 | 217.64 |
| 97 | TATGGTGTGCAGGCGAATAGT | 5076 | YGVQANS | 6743 | 217.293 |
| 98 | TTGCAGACGCCTGGGACGACG | 5077 | LQTPGTT | 6744 | 217.179 |
| 99 | TATCAGCAGACTTCTAGTACG | 5078 | YQQTSST | 6745 | 216.8135 |
| 100 | CAAACGAACACCAACGACAGA | 5079 | QTNTNDR | 6746 | 216.664 |
| 101 | ATGGATAAGTCTAATAATTCT | 5080 | MDKSNNS | 6747 | 216.638 |
| 102 | CATCTTAGTCAGGCTAATCAT | 5081 | HLSQANH | 6748 | 216.575 |
| 103 | GTTGGTGCGAGTACGGCTTCG | 5082 | VGASTAS | 6749 | 215.9195 |
| 104 | CACAACAACAACCTGCAAAAC | 5083 | HNNNLQN | 6750 | 215.084 |
| 105 | AGTACTTATGGGAATACTTAT | 5084 | STYGNTY | 6751 | 214.971 |
| 106 | CGGGCTGATGTTTCTTGGTCT | 5085 | RADVSWS | 6752 | 214.499 |
| 107 | CGAGGAGACAACAGCACACCG | 5086 | RGDNSTP | 6753 | 214.29 |
| 108 | GGTCGGGATTATGCTATGAGT | 5087 | GRDYAMS | 6754 | 214.166 |
| 109 | CCTAACAACGAAAAAAACCCG | 5088 | PNNEKNP | 6755 | 214.048 |
| 110 | GATAATGTGAATTCTCAGCCT | 5089 | DNVNSQP | 6756 | 213.6615 |
| 111 | ATGGGGACTGAGTATCGTATG | 5090 | MGTEYRM | 6757 | 213.606 |
| 112 | AATCAGAGTATTAATAATATT | 5091 | NQSINNI | 6758 | 213.36 |
| 113 | GCCATAGACTCTATCAAACAA | 5092 | AIDSIKQ | 6759 | 213.304 |
| 114 | GTTGAGTCTTCTTATTCTCGG | 5093 | VESSYSR | 6760 | 212.9405 |
| 115 | GGTCAGTATAGTCAGACGCTT | 5094 | GQYSQTL | 6761 | 212.242 |
| 116 | ACCATCCAAGACCACATAAAA | 5095 | TIQDHIK | 6762 | 212.116 |
| 117 | AACAGTTCCCAATGGCCCAAC | 5096 | NSSQWPN | 6763 | 211.938 |
| 118 | ACGGATAATGGTCTTCTTGTG | 5097 | TDNGLLV | 6764 | 211.787 |
| 119 | GTAAGAGAAACCACACACCTC | 5098 | VRETTHL | 6765 | 211.44 |
| 120 | CGTGGTGATATGACTCGTGCG | 5099 | RGDMTRA | 6766 | 211.181 |
| 121 | ACTTATGGTATTACTCATGAT | 5100 | TYGITHD | 6767 | 210.641 |
| 122 | ACGGCGCTGAATACGTATCCT | 5101 | TALNTYP | 6768 | 210.568 |
| 123 | GGTGGCGAAAACAGAACCCCA | 5102 | GGENRTP | 6769 | 210.4 |
| 124 | TATCTGCAGGAGAAGTTTCCT | 5103 | YLQEKFP | 6770 | 210.3715 |
| 125 | CTTAATCTTACTAATCATAAT | 5104 | LNLTNHN | 6771 | 209.727 |
| 126 | GGATTAGCTAGTCTACACCTG | 5105 | GLASLHL | 6772 | 209.3585 |
| 127 | GTAGAACACGTAGCCCACCAA | 5106 | VEHVAHQ | 6773 | 209.322 |
| 128 | AGCGAACACCACGCCGGAATA | 5107 | SEHHAGI | 6774 | 209.188 |
| 129 | GAAGCGTCCAACTACGAACGA | 5108 | EASNYER | 6775 | 208.926 |
| 130 | CCCTCCAACAGTGAAAGATTC | 5109 | PSNSERF | 6776 | 208.6635 |
| 131 | TCCCCCGGCAACGGGTTGCTA | 5110 | SPGNGLL | 6777 | 208.4985 |
| 132 | ATACTGAAATCCGACGCACCA | 5111 | ILKSDAP | 6778 | 208.297 |
| 133 | TTTGATAGTGCGAATGGTCGG | 5112 | FDSANGR | 6779 | 208.26 |
| 134 | GATGGTAAGACTACGTCTAAT | 5113 | DGKTTSN | 6780 | 207.768 |
| 135 | ACTAATTATCCTGAGGCGAAT | 5114 | TNYPEAN | 6781 | 207.706 |
| 136 | CGAGGAGACCACAGCACACCG | 5115 | RGDHSTP | 6782 | 207.4315 |
| 137 | CAGACGACTATTCTGGCTGCT | 5116 | QTTILAA | 6783 | 207.223 |
| 138 | GCTACTGCGCATCAGGATGGT | 5117 | ATAHQDG | 6784 | 207.212 |
| 139 | CAAGCCCTGGCCACCACAAAC | 5118 | QALATTN | 6785 | 207.096 |
| 140 | TATAATGCTACTCCTTCGCAG | 5119 | YNATPSQ | 6786 | 206.964 |
| 141 | GAGCTGTCTACTCCTATGGTT | 5120 | ELSTPMV | 6787 | 206.8655 |
| 142 | ATTAATATTAGTAGTGATTTT | 5121 | INISSDF | 6788 | 206.753 |
| 143 | GTAACGGCACACCAATTATCC | 5122 | VTAHQLS | 6789 | 206.7385 |
| 144 | GGAGAAAGCTCCTCAATAAGC | 5123 | GESSSIS | 6790 | 206.656 |
| 145 | GAATCCCTCCCAATCTCTAAA | 5124 | ESLPISK | 6791 | 206.576 |
| 146 | ACGAATGTTAGTACGCTTTTG | 5125 | TNVSTLL | 6792 | 206.455 |
| 147 | TGGCAGACGAATGGTATGCAG | 5126 | WQTNGMQ | 6793 | 206.4378 |
| 148 | TACAGGATGGAAACGAACCCA | 5127 | YRMETNP | 6794 | 206.121 |
| 149 | ATAACCGGCAACACCGTCGGA | 5128 | ITGNTVG | 6795 | 205.9135 |
| 150 | CTGAACACTCTAATCCACAAA | 5129 | LNTLIHK | 6796 | 205.873 |
| 151 | GGGACTTCCTTGGAAAACCGA | 5130 | GTSLENR | 6797 | 205.8535 |
| 152 | TACCAACACAACCAAGCCCAC | 5131 | YQHNQAH | 6798 | 205.473 |
| 153 | ATTGAGAGTAAGACTGTGCAG | 5132 | IESKTVQ | 6799 | 205.0365 |
| 154 | TATACGCAGGGTATTATGAAT | 5133 | YTQGIMN | 6800 | 204.5275 |
| 155 | AGTACGAATGAGGCTCCTAAG | 5134 | STNEAPK | 6801 | 204.522 |
| 156 | TTGTCTCAGAATTTTAATCCT | 5135 | LSQNFNP | 6802 | 204.3926 |
| 157 | TACTCTTCTGAAATGAGCGAA | 5136 | YSSEMSE | 6803 | 204.31 |
| 158 | TCATACGGAGGATCTGGCCCC | 5137 | SYGGSGP | 6804 | 204.28 |
| 159 | ATGGACGCTGCGTACGGTAGT | 5138 | MDAAYGS | 6805 | 203.959 |
| 160 | CCTTTTAATCCTGGGAATGTG | 5139 | PFNPGNV | 6806 | 203.2041 |
| 161 | CAAAAATCGGAAACCTACACT | 5140 | QKSETYT | 6807 | 203.1248 |
| 162 | AACAAAGACCACAACCACCTG | 5141 | NKDHNHL | 6808 | 202.8605 |
| 163 | CTAACCGGCTCTGACATGAAA | 5142 | LTGSDMK | 6809 | 202.379 |
| 164 | TCTAAGGATAGTACTATGTAT | 5143 | SKDSTMY | 6810 | 202.335 |
| 165 | GAAGCATTCCCGCGAGCGGGC | 5144 | EAFPRAG | 6811 | 202.275 |
| 166 | GAACACACTCACTTAAACCCG | 5145 | EHTHLNP | 6812 | 201.959 |
| 167 | AGTTCGGACCCAAAAGGTCAA | 5146 | SSDPKGQ | 6813 | 201.825 |
| 168 | AAAACCATCGACATAGCACAA | 5147 | KTIDIAQ | 6814 | 201.699 |
| 169 | ACCGGTAGCTTGAACTCTATG | 5148 | TGSLNSM | 6815 | 201.671 |
| 170 | ATGCAACGCGAAGACGCGAAC | 5149 | MQREDAN | 6816 | 201.523 |
| 171 | GCCTCTACAGTCTCACTCTAC | 5150 | ASTVSLY | 6817 | 201.407 |
| 172 | GGCCGTGACGACCTCACAAAC | 5151 | GRDDLTN | 6818 | 200.911 |
| 173 | TCTAATCCGGGTAATCATAAT | 5152 | SNPGNHN | 6819 | 200.872 |
| 174 | GATACTTATAAGGGTAAGTGG | 5153 | DTYKGKW | 6820 | 200.7787 |
| 175 | CCACCCAACGGCAGCAGTAGA | 5154 | PPNGSSR | 6821 | 200.32615 |
| 176 | GCTTCTTATAGTATTTCTGAT | 5155 | ASYSISD | 6822 | 200.269 |
| 177 | GTGACTGTTAGTCTGGATGGG | 5156 | VTVSLDG | 6823 | 200.021 |
| 178 | ATGGCCATAGGCCACTCCCCA | 5157 | MAIGHSP | 6824 | 200 |
| 179 | TTTCGGACGGTGTATACTGGT | 5158 | FRTVYTG | 6825 | 200 |
| 180 | AAAAAACGGCAGCCCATCGCC | 5159 | KKRQPIA | 6826 | 200 |
| 181 | AAAAATAAGCTCTACTATGGC | 5160 | KNKLYYG | 6827 | 200 |
| 182 | TCTACATCTCCGGTTAACAGC | 5161 | STSPVNS | 6828 | 200 |
| 183 | GGGTCTGGGATTGCGGGGACT | 5162 | GSGIAGT | 6829 | 200 |
| 184 | ATCGACGTACTGAACGGAAGT | 5163 | IDVLNGS | 6830 | 200 |
| 185 | GGTCATAATATGGCACAGGCG | 5164 | GHNMAQA | 6831 | 200 |
| 186 | ACGAGGAGCAACTCCGACGAA | 5165 | TRSNSDE | 6832 | 200 |
| 187 | GGAGCAAAAGGAACCATGGGC | 5166 | GAKGTMG | 6833 | 200 |
| 188 | GCTACTACTCTTACTGGTGAT | 5167 | ATTLTGD | 6834 | 200 |
| 189 | TTCAACACATCGTCGGAATTC | 5168 | FNTSSEF | 6835 | 200 |
| 190 | TATACGGCGCAGACCGGCTGG | 5169 | YTAQTGW | 6836 | 200 |
| 191 | CGAGTAAACAACGACGCAATA | 5170 | RVNNDAI | 6837 | 200 |
| 192 | ACTATTCAGCTTACTGATACT | 5171 | TIQLTDT | 6838 | 200 |
| 193 | GCCAGCATGCCCTCTGTAGAC | 5172 | ASMESVD | 6839 | 200 |
| 194 | AATCAGGTGGGTGCGTCTGCG | 5173 | NQVGASA | 6840 | 200 |
| 195 | GGAAACATGGTGACTCCAAAC | 5174 | GNMVTPN | 6841 | 200 |
| 196 | CGTGGTGACCAAGGCACACAC | 5175 | RGDQGTH | 6842 | 200 |
| 197 | TCGAGTGATTCTCGTATTCCG | 5176 | SSDSRIP | 6843 | 200 |
| 198 | GGACTGCACGGCACCAACGCA | 5177 | GLHGTNA | 6844 | 200 |
| 199 | TCTAGTTATCAGTCTGGGCTG | 5178 | SSYQSGL | 6845 | 199.609 |
| 200 | ACAGCCTACTCGCCCACAGTC | 5179 | TAYSPTV | 6846 | 199.236 |
| 201 | CGCAGTGACACCACTAACGCC | 5180 | RSDTTNA | 6847 | 198.59 |
| 202 | CGTATTGTGGCTAATGAGCAG | 5181 | RIVANEQ | 6848 | 197.795 |
| 203 | ATCCACAACGAATCATACGTC | 5182 | IHNESYV | 6849 | 197.72 |
| 204 | CAGCAGAATACGCGTTTGCCG | 5183 | QQNTRLP | 6850 | 197.4665 |
| 205 | GGTATCAACTCCTCACACTTC | 5184 | GINSSHF | 6851 | 197.224 |
| 206 | GGTATGACTTCTAATCAGGTT | 5185 | GMTSNQV | 6852 | 196.916 |
| 207 | AGGGAGATTGTTCATAGTAAT | 5186 | REIVHSN | 6853 | 196.5775 |
| 208 | GCAGAACACACGTACACGGTC | 5187 | AEHTYTV | 6854 | 196.501 |
| 209 | CCTGCTACGCTACACCTGACA | 5188 | PATLHLT | 6855 | 196.1975 |
| 210 | AAGCAGACTGATAGTAGGGGT | 5189 | KQTDSRG | 6856 | 196.15 |
| 211 | ACTATGGTAGAAGTACTGCCA | 5190 | TMVEVLP | 6857 | 195.586 |
| 212 | ATCCCAACCGGCCAAACTAGC | 5191 | IPTGQTS | 6858 | 195.499 |
| 213 | ATGATAAAAACCAACATGTTG | 5192 | MIKTNML | 6859 | 195.198 |
| 214 | GCGGAACGACCCACTAGAGAC | 5193 | AERPTRD | 6860 | 194.842 |
| 215 | CGGGATCTGGGGCAGACCGGC | 5194 | RDLGQTG | 6861 | 194.34 |
| 216 | AATGAGGGGCGTGTGCAGACT | 5195 | NEGRVQT | 6862 | 194.00545 |
| 217 | ACTGCGGCTAGTACTGCGAGG | 5196 | TAASTAR | 6863 | 193.5855 |
| 218 | ACCCAAGGGAACAACATGGTA | 5197 | TQGNNMV | 6864 | 193.362 |
| 219 | CATAGTACTTTTCCTACGACT | 5198 | HSTFPTT | 6865 | 193.274 |
| 220 | CAATCTATCGGCCACCCCGTT | 5199 | QSIGHPV | 6866 | 191.64595 |
| 221 | TCGGGTGTTAATAGTGAGCGT | 5200 | SGVNSER | 6867 | 191.3763 |
| 222 | CCTCACGCCAACGGAGTGACA | 5201 | PHANGVT | 6868 | 191.349 |
| 223 | GACCACCAACAAGCCCTAGCT | 5202 | DHQQALA | 6869 | 191.305 |
| 224 | AGTCAGCAGGGTTTTACTCTG | 5203 | SQQGFTL | 6870 | 191.2955 |
| 225 | ACAAACGCTGCTCTAGTACCA | 5204 | TNAALVP | 6871 | 191.1973 |
| 226 | GGTGTTAGTAGTAATTCTGCG | 5205 | GVSSNSA | 6872 | 190.1595 |
| 227 | CATGATACGGTTGGGGAGAGG | 5206 | HDTVGER | 6873 | 189.859 |
| 228 | GCGTTAAACGCCCAAGGGATC | 5207 | ALNAQGI | 6874 | 189.3825 |
| 229 | CATGATAGTATGTGTTGTGCG | 5208 | HDSMCCA | 6875 | 189.35 |
| 230 | TACATCGCGGCAGGGGAACAA | 5209 | YIAAGEQ | 6876 | 189.046 |
| 231 | GAGAATGCTCGTGAGGGTGTG | 5210 | ENAREGV | 6877 | 188.331 |
| 232 | GCTACGGTTTATAATGAGTTG | 5211 | ATVYNEL | 6878 | 188.18 |
| 233 | GACACTAACGGAATAAAATCA | 5212 | DTNGIKS | 6879 | 187.628 |
| 234 | AAGCCGACTGCGAATGATTGG | 5213 | KPTANDW | 6880 | 187.4884 |
| 235 | TATGAGAGTACTCATGTTAAT | 5214 | YESTHVN | 6881 | 187.1195 |
| 236 | TACACCAACGGGGGCCACCTA | 5215 | YTNGGHL | 6882 | 187.0304 |
| 237 | GTAGACAAATCTAGCCCAGTG | 5216 | VDKSSPV | 6883 | 186.9365 |
| 238 | CCAATCCAAAACGAATCGTCC | 5217 | PIQNESS | 6884 | 186.748 |
| 239 | ATACACAAATCTAGCGTCGAA | 5218 | IHKSSVE | 6885 | 186.654 |
| 240 | CATGATATTAGTCTGGATCGT | 5219 | HDISLDR | 6886 | 186.65 |
| 241 | TGGTGAGGGGCTGAGTTTGCC | 5220 | W*GAEFA | 6887 | 186.1 |
| 242 | TACTCTCAATCCATAAAAAAC | 5221 | YSQSIKN | 6888 | 186.0095 |
| 243 | GCCCAAGACAACAACCACGAC | 5222 | AQDNNHD | 6889 | 185.6231 |
| 244 | GGGCAGAAGGAGACTACTGCG | 5223 | GQKETTA | 6890 | 184.948 |
| 245 | AAAAGCGAAGTACCCGCCCGA | 5224 | KSEVPAR | 6891 | 184.116 |
| 246 | GAACTTAACACCGCACACGCA | 5225 | ELNTAHA | 6892 | 184.059 |
| 247 | AGCACAAACGCGGGACAAAGG | 5226 | STNAGQR | 6893 | 183.7145 |
| 248 | AAGGCGGTTTCGGAGATTATT | 5227 | KAVSEII | 6894 | 183.539 |
| 249 | ACCTTCACGGTCGACGGTAGA | 5228 | TFTVDGR | 6895 | 183.2535 |
| 250 | AGTACGAGTGGTTATAATACT | 5229 | STSGYNT | 6896 | 182.703 |
| 251 | AATCATAGTCTGTCGGAGCAT | 5230 | NHSLSEH | 6897 | 182.427 |
| 252 | TCTATGCAGGATCCTTCTTTG | 5231 | SMQDPSL | 6898 | 182.375 |
| 253 | GAACAACAAAAAACAGACAAC | 5232 | EQQKTDN | 6899 | 182.331 |
| 254 | GCTGTTGTGAATGAGAATATG | 5233 | AVVNENM | 6900 | 182.3 |
| 255 | GGTCCCGGAGAAAACTACCGA | 5234 | GPGENYR | 6901 | 182.165 |
| 256 | TACAACGCAGGCGGAGAACAA | 5235 | YNAGGEQ | 6902 | 182.14 |
| 257 | GTCCTCTCCTCCAACCTGTAC | 5236 | VLSSNLY | 6903 | 181.3605 |
| 258 | GGTCTTTATCAGAATCCTACG | 5237 | GLYQNPT | 6904 | 181.2475 |
| 259 | AGTTCGGGGAGTTTGATTACT | 5238 | SSGSLIT | 6905 | 180.8125 |
| 260 | TATAATACGGATCGGACTAAT | 5239 | YNTDRTN | 6906 | 180.0485 |
| 261 | GAGAAGCCTCAGCATAATAGT | 5240 | EKPQHNS | 6907 | 179.9715 |
| 262 | GCGGCTTATGAGCATGCGCCT | 5241 | AAYEHAP | 6908 | 178.7065 |
| 263 | GGCGGCAACTACAACACAACT | 5242 | GGNYNTT | 6909 | 178.62 |
| 264 | TATCTGAATAGTACGCAGATT | 5243 | YLNSTQI | 6910 | 178.4905 |
| 265 | TCTAATTCTAATACTGCTGCT | 5244 | SNSNTAA | 6911 | 178.119 |
| 266 | TCGGATAATAGGAATACTGCG | 5245 | SDNRNTA | 6912 | 178.09355 |
| 267 | CGCTCGTTGGACAGCGGGATG | 5246 | RSLDSGM | 6913 | 177.6395 |
| 268 | GTTATGGATACGCATGGGATG | 5247 | VMDTHGM | 6914 | 177.54 |
| 269 | CATGTTACGGCGGTGGTTGAT | 5248 | HVTAVVD | 6915 | 177.447 |
| 270 | AGTATCACCCACAGCAACACC | 5249 | SITHSNT | 6916 | 177.4093 |
| 271 | GGATACGGCAGTTACAGCAAC | 5250 | GYGSYSN | 6917 | 177.0995 |
| 272 | CGTTGGTCTGAAAACAACTCC | 5251 | RWSENNS | 6918 | 176.788 |
| 273 | ATGTCTAGCCACACCGTCCAA | 5252 | MSSHTVQ | 6919 | 176.741 |
| 274 | TATGTTAGGGCGCAGGATCAG | 5253 | YVRAQDQ | 6920 | 176.713 |
| 275 | TTTGAGGGTGATAAGACTTAT | 5254 | FEGDKTY | 6921 | 176.655 |
| 276 | GTTAGCTCCGGCCACACGAAA | 5255 | VSSGHTK | 6922 | 176.4715 |
| 277 | TCGATGAACCTGCCAACTTCA | 5256 | SMNLPTS | 6923 | 176.425 |
| 278 | CTGAATCCTCAGCATGAGTTG | 5257 | LNPQHEL | 6924 | 176.19 |
| 279 | CTTCCGCCTGCGTCGGCGGGT | 5258 | LPPASAG | 6925 | 176.057 |
| 280 | GGAGGGAACTCCCACGGGGTA | 5259 | GGNSHGV | 6926 | 175.7625 |
| 281 | GGGGGTACGGGGTTGTCGAAG | 5260 | GGTGLSK | 6927 | 175.714 |
| 282 | AGTTTGAATTCTTCGAGTACT | 5261 | SLNSSST | 6928 | 175.4585 |
| 283 | ATGCCTAGTGAACCACCAGGG | 5262 | MFSEPPG | 6929 | 175.45 |
| 284 | GTTGTGCATTCGAGTATTACT | 5263 | VVHSSIT | 6930 | 175.18685 |
| 285 | TTGAGTCTGGCTGGGAATAGG | 5264 | LSLAGNR | 6931 | 175.0985 |
| 286 | GCGGACATGCAACACACCGTA | 5265 | ADMQHTV | 6932 | 175.003 |
| 287 | TTTCGTGATGGTCAGGGTATG | 5266 | FRDGQGM | 6933 | 174.983 |
| 288 | ACCGGAACAGCGATCTCCCGA | 5267 | TGTAISR | 6934 | 174.5465 |
| 289 | ATGGGGAAGCATGAGGGTCTT | 5268 | MGKHEGL | 6935 | 174.3418 |
| 290 | CCGGAATCCGCCGCCAAAAGC | 5269 | PESAAKS | 6936 | 174.268 |
| 291 | ACCCAAGCCTTCTCCCTAGGC | 5270 | TQAFSLG | 6937 | 174.2365 |
| 292 | ACTGATGGTATTTTTCAGCCT | 5271 | TDGIFQP | 6938 | 174.014 |
| 293 | GGGAGCCCAGTGATAGTAAAC | 5272 | GSPVIVN | 6939 | 173.652 |
| 294 | GGGCGTGATAATCATCATGCG | 5273 | GRDNHHA | 6940 | 173.4132 |
| 295 | CCGCGTTCTATTACGGAGTTG | 5274 | PRSITEL | 6941 | 173.403 |
| 296 | TGGGTAAACAGTGTGGGCAAC | 5275 | WVNSVGN | 6942 | 173.244 |
| 297 | GTTCATGGGACGTTGACTTAT | 5276 | VHGTLTY | 6943 | 173.1685 |
| 298 | GGTGTGTATATTGATGGTCGG | 5277 | GVYIDGR | 6944 | 173.081 |
| 299 | ATGAGTAATGATTTGCCTGGG | 5278 | MSNDLPG | 6945 | 172.671 |
| 300 | AATCGGTCGGATAGTTTTGCG | 5279 | NASDSFA | 6946 | 172.6595 |
| 301 | GGGCAAACAAACGCAGTACAC | 5280 | GQTNAVH | 6947 | 172.4582 |
| 302 | TACGTCGACAAATCAATGACA | 5281 | YVDKSMT | 6948 | 172.1735 |
| 303 | AGTGTGATGGTGGGTACGAAT | 5282 | SVMVGTN | 6949 | 171.86 |
| 304 | ATTGGTCTGCAGAATTCTACT | 5283 | IGLQNST | 6950 | 171.84715 |
| 305 | AACGACCGACCGCTTGCCAGC | 5284 | NDRPLAS | 6951 | 171.464 |
| 306 | CTCATGGGCAGTCCAGGCGCG | 5285 | LMGSPGA | 6952 | 171.27 |
| 307 | ATTGATCGTAGTGCTAGTTTG | 5286 | IDRSASL | 6953 | 171.009 |
| 308 | ATTCAGGCGAAGAATTCTGAG | 5287 | IQAKNSE | 6954 | 170.983 |
| 309 | CATCAGTCTTTTGATGCTGGT | 5288 | HQSFDAG | 6955 | 170.699 |
| 310 | GCGGTTAATGAGACTAGGCTT | 5289 | AVNETRL | 6956 | 170.564 |
| 311 | ATCGCGTCAACGTGGAACATG | 5290 | IASTWNM | 6957 | 170.52 |
| 312 | AAAGTGGACATGACCTCCAAA | 5291 | KVDMTSK | 6958 | 170.4035 |
| 313 | TCTCATAGTATTACGGGTCTT | 5292 | SHSITGL | 6959 | 170.333 |
| 314 | ACTATTACTAGTCCGTCGGTG | 5293 | TITSPSV | 6960 | 170.18 |
| 315 | GAACACATCTCTAGCTACGGA | 5294 | EHISSYG | 6961 | 169.832 |
| 316 | TTCTCAACAAACTCTGTAATC | 5295 | FSTNSVI | 6962 | 169.7245 |
| 317 | TCGATGGAGGGTCAGCAGCAT | 5296 | SMEGQQH | 6963 | 169.71 |
| 318 | GTCGACAAAAGCGAAGCCGTC | 5297 | VDKSEAV | 6964 | 169.6265 |
| 319 | CAAGCTAACTTATCAATAATC | 5298 | QANLSII | 6965 | 169.3842 |
| 320 | GTTAAGGCGAGTGCTGGGGTT | 5299 | VKASAGV | 6966 | 169.1112 |
| 321 | TTTGGTACTTCTTATACGACT | 5300 | FGTSYTT | 6967 | 168.915 |
| 322 | GGGCTCACAGGATACCCAATG | 5301 | GLTGYPM | 6968 | 168.8625 |
| 323 | GCTATGGGAGCACTCGTGCAC | 5302 | AMGALVH | 6969 | 168.807 |
| 324 | GTATACGCCACCGCACTCGCA | 5303 | VYATALA | 6970 | 168.7005 |
| 325 | ACATTAACAGACGTTCACCGA | 5304 | TLTDVHR | 6971 | 168.7 |
| 326 | CCATCCTCAGCGGGTAGCACA | 5305 | PSSAGST | 6972 | 168.601 |
| 327 | AAAAAACGAAAACACTAACTA | 5306 | KKRKH*L | 6973 | 168.58 |
| 328 | GCTTATCAGCTGACTCCGGCT | 5307 | AYQLTPA | 6974 | 168.579 |
| 329 | CTTGCGCCTGATAATATTGGG | 5308 | LAPDNIG | 6975 | 168.515 |
| 330 | ACAATCGTTTCCGCTTACGCC | 5309 | TIVSAYA | 6976 | 168.3875 |
| 331 | GGTAATAATTTGAGTTTGTCT | 5310 | GNNLSLS | 6977 | 168.1503 |
| 332 | AGCACAAACACCGAACCTAGG | 5311 | STNTEPR | 6978 | 168.122 |
| 333 | TCTTTTCAGACGGATCGTGCG | 5312 | SFQTDRA | 6979 | 167.793 |
| 334 | TTCTTAGAAGGAGTCGCTCAA | 5313 | FLEGVAQ | 6980 | 167.647 |
| 335 | CAAGACGTAGGACGCACGAAC | 5314 | QDVGRTN | 6981 | 167.4595 |
| 336 | ACGCATGGTGATCATATTCAG | 5315 | THGDHIQ | 6982 | 167.197 |
| 337 | GTATCAGAAGGACAACGAATC | 5316 | VSEGQRI | 6983 | 167.049 |
| 338 | AACATGGGTCCAATGGGCCGG | 5317 | NMGPMGR | 6984 | 166.961 |
| 339 | CTACCCTCAACAGAAACTTTG | 5318 | LPSTETL | 6985 | 166.942 |
| 340 | GGTGGTATGTCGGCGCATTCG | 5319 | GGMSAHS | 6986 | 166.775 |
| 341 | GGGATGATCGGGCACAACGCA | 5320 | GMIGHNA | 6987 | 166.716 |
| 342 | ATAGACGAACGTTCCTCGATA | 5321 | IDEASSI | 6988 | 166.601 |
| 343 | CATGTGAATCCTACGCCGGCG | 5322 | HVNPTPA | 6989 | 166.586 |
| 344 | TGGTCGAGAACTGGAAACACC | 5323 | WSRTGNT | 6990 | 166.483 |
| 345 | ATCAAAGACTCGTACCTTACT | 5324 | IKDSYLT | 6991 | 166.205 |
| 346 | TTGAACCAAAACAGTGTCTCC | 5325 | LNQNSVS | 6992 | 166.174 |
| 347 | TCTGGTCCGATTCCTGCTGTT | 5326 | SGPIPAV | 6993 | 166.146 |
| 348 | ATGCAAGGGCTTAACAACATG | 5327 | MQGLNNM | 6994 | 165.268 |
| 349 | TCAAACAGCGGAGGCAACCAC | 5328 | SNSGGNH | 6995 | 165.1895 |
| 350 | ACGAGTACGATGACTGCGCGT | 5329 | TSTMTAR | 6996 | 165.115 |
| 351 | GAGAATAGTGATTTGTCTTAT | 5330 | ENSDLSY | 6997 | 165.08 |
| 352 | CATCCTGGGAATAGTTCTGTG | 5331 | HPGNSSV | 6998 | 165.062 |
| 353 | TTAACACCCCAAGGGACTAGT | 5332 | LTPQGTS | 6999 | 165.0315 |
| 354 | ACCGACACCCGAAAAAACGAC | 5333 | TDTRKND | 7000 | 164.843 |
| 355 | GGGGAGACGCTGAGGTCTCAG | 5334 | GETLRSQ | 7001 | 164.72165 |
| 356 | AGCGGTGTATCAGAAGGAAAC | 5335 | SGVSEGN | 7002 | 164.715 |
| 357 | ACTCAGTATGGTACTCTGCCG | 5336 | TQYGTLP | 7003 | 164.526 |
| 358 | GGGACGGTTAACTCAAGTGCA | 5337 | GTVNSSA | 7004 | 164.3765 |
| 359 | GGTAAAGCAACCTTAGTCCTC | 5338 | GKATLVL | 7005 | 164.3755 |
| 360 | GGTATATACCCGGCATCCACC | 5339 | GIYPAST | 7006 | 164.34 |
| 361 | GGTGTTATGTCTAATGCTACT | 5340 | GVMSNAT | 7007 | 164.06 |
| 362 | ACTCATGTGATTGGGGCTGTG | 5341 | THVIGAV | 7008 | 163.918 |
| 363 | ACTCGGAGTGATATTGGTGTG | 5342 | TRSDIGV | 7009 | 163.7255 |
| 364 | ACGCTTACATTATCTACCCTC | 5343 | TLTLSTL | 7010 | 163.5555 |
| 365 | TATAATGAGTCTTCGAATGCG | 5344 | YNESSNA | 7011 | 163.314 |
| 366 | TCGACGCAGGCGCAGACCGGC | 5345 | STQAQTG | 7012 | 163.15 |
| 367 | CGCGACATGATCAACTCATCA | 5346 | RDMINSS | 7013 | 162.984 |
| 368 | ACTAAGGGTAATAATCTGGTT | 5347 | TKGNNLV | 7014 | 162.899 |
| 369 | GGTTCTACGGTGTCGGCGCAG | 5348 | GSTVSAQ | 7015 | 162.631 |
| 370 | AGGGGTGATACTATGAATTAT | 5349 | RGDTMNY | 7016 | 162.425 |
| 371 | CATGCGGATGTGAATGCTGGG | 5350 | HADVNAG | 7017 | 161.99 |
| 372 | AGCGTTGTCAACACCAACATC | 5351 | SVVNTNI | 7018 | 161.9445 |
| 373 | TCTAATGTTCATGTTGTTAAT | 5352 | SNVHVVN | 7019 | 161.753 |
| 374 | TCGGTTGATAAGCCGCCGGGG | 5353 | SVDKPPG | 7020 | 161.487 |
| 375 | GACCGCACCTACTCAAACACA | 5354 | DRTYSNT | 7021 | 161.475 |
| 376 | TACTCCGGAGAACTAAACAAA | 5355 | YSGELNK | 7022 | 161.125 |
| 377 | TATGATAAGACTTTGAGTGTT | 5356 | YDKTLSV | 7023 | 160.90695 |
| 378 | CACACCGCCACCCTTAGCAGC | 5357 | HTATLSS | 7024 | 160.8605 |
| 379 | GCTCTGGAGAGGGCTCAGTAT | 5358 | ALERAQY | 7025 | 160.837 |
| 380 | GGTACGAGTGATAATTATAGG | 5359 | GTSDNYR | 7026 | 160.175 |
| 381 | CATGTGAATAGTAGGGATCTT | 5360 | HVNSRDL | 7027 | 160.127 |
| 382 | TCGTCAGACGTTACCAGACAA | 5361 | SSDVTRQ | 7028 | 160.07 |
| 383 | GCTCATCATATGACGACGGAG | 5362 | AHHMTTE | 7029 | 160.019 |
| 384 | GAGGTGTCTAGGGATGGTCTG | 5363 | EVSRDGL | 7030 | 159.7445 |
| 385 | GTGGGCCGTGACGCAGAAGCT | 5364 | VGRDAEA | 7031 | 159.58 |
| 386 | GCACACCAAAAAGACCTACGC | 5365 | AHQKDLR | 7032 | 159.3139 |
| 387 | AGTGTTCTGAGTAGTTCGACT | 5366 | SVLSSST | 7033 | 159.208 |
| 388 | CTGGGTACGCTGCTTAGTCAG | 5367 | LGTLLSQ | 7034 | 159.04 |
| 389 | TCACAAAAACCAATCGACGAC | 5368 | SQKPIDD | 7035 | 158.663 |
| 390 | GATAATGTGCATGGGCAGGTG | 5369 | DNVHGQV | 7036 | 158.321 |
| 391 | GGTTCGCACAACGGGCCGACA | 5370 | GSHNGPT | 7037 | 157.748 |
| 392 | ATCTCCGGTAGTAGCAGTCTA | 5371 | ISGSSSL | 7038 | 157.64 |
| 393 | GGTTTTCATATTAATGGTGAG | 5372 | GFHINGE | 7039 | 157.326 |
| 394 | ATGAGTGATGGGCATTCGAAG | 5373 | MSDGHSK | 7040 | 157.296 |
| 395 | ACTGTTGGTGGTAATCATCAT | 5374 | TVGGNHH | 7041 | 156.895 |
| 396 | AATGCTACTCCGCCGAATCAT | 5375 | NATPPNH | 7042 | 156.8609 |
| 397 | ACGGGTATGAATAGTAATAAG | 5376 | TGMNSNK | 7043 | 156.85 |
| 398 | ATCGAAGCCTACTCACGAGAC | 5377 | IEAYSRD | 7044 | 156.774 |
| 399 | CGCGACCGTCAAGACTCGGTA | 5378 | RDRQDSV | 7045 | 156.7165 |
| 400 | CACACGGTTCAAATACGCGAA | 5379 | HTVQIRE | 7046 | 156.6241 |
| 401 | ACTTTGACGCAGACTGGGATG | 5380 | TLTQTGM | 7047 | 156.5735 |
| 402 | ATTAATAATTTTAATACTCTG | 5381 | INNFNTL | 7048 | 156.48 |
| 403 | GTAGCCGCGGGACCAGAAGCG | 5382 | VAAGPEA | 7049 | 156.315 |
| 404 | GATGGTAAGAATAGTTATGCG | 5383 | DGKNSYA | 7050 | 156.294 |
| 405 | TCCAGGCAAGAAAACTTCTCC | 5384 | SRQENFS | 7051 | 156.182 |
| 406 | TCTAACAGCAGTGTTGCGGTA | 5385 | SNSSVAV | 7052 | 156.048 |
| 407 | GATCATAGTAAGCAGAGTTCG | 5386 | DHSKQSS | 7053 | 155.89425 |
| 408 | TTGAGTGGTGCTGGTAGTCAG | 5387 | LSGAGSQ | 7054 | 154.9295 |
| 409 | GGTTGGAGTAATAATGAGTTG | 5388 | GWSNNEL | 7055 | 154.4735 |
| 410 | CTAATACGAGGTTCCATGGAA | 5389 | LIRGSME | 7056 | 154.426 |
| 411 | AATACTTATACTGCTGGTAAG | 5390 | NTYTAGK | 7057 | 154.346 |
| 412 | ACTCGTGGCGACATGGAATTC | 5391 | TRGDMEF | 7058 | 154.246 |
| 413 | CTCATGTCAGGGAAAGAAAAC | 5392 | LMSGKEN | 7059 | 154.155 |
| 414 | AAGGATACTAATCAGCAGATT | 5393 | KDTNQQI | 7060 | 153.7595 |
| 415 | CACAACGTCGGCCTAGGACAC | 5394 | HNVGLGH | 7061 | 153.7 |
| 416 | CCTGATCAGCCTGGTCCTTCT | 5395 | PDQPGPS | 7062 | 153.51 |
| 417 | ATGCAAAGAGAAGCAGCCAAC | 5396 | MQREAAN | 7063 | 153.45 |
| 418 | GGGCAGCGTACGACGAATGAT | 5397 | GQRTTND | 7064 | 153.425 |
| 419 | AAACACACAGAAAACGGGACC | 5398 | KHTENGT | 7065 | 153.394 |
| 420 | TTAGACGTGACGAGAATGAGA | 5399 | LDVTRMR | 7066 | 153.086 |
| 421 | ACGTTGGATCGGAATCAGACT | 5400 | TLDRNQT | 7067 | 152.9552 |
| 422 | ATCAACGCCGGCAACTACCGA | 5401 | INAGNYR | 7068 | 152.8475 |
| 423 | GCCGTAGACCAATCACGTTTG | 5402 | AVDQSRL | 7069 | 152.8359 |
| 424 | GCTCTTGGGCATCAGGGGAAT | 5403 | ALGHQGN | 7070 | 152.467 |
| 425 | CTTCCGCGTCATGATCAGTAT | 5404 | LPRHDQY | 7071 | 152.412 |
| 426 | ATTTCTGGGTCGTCGTCTCTT | 5405 | ISGSSSL | 7072 | 152.2375 |
| 427 | TGGAATACGAATATGGCGATT | 5406 | WNTNMAI | 7073 | 151.8755 |
| 428 | ATGTCGGATCGTACTTCTGAT | 5407 | MSDRTSD | 7074 | 151.677 |
| 429 | ACAAGGGAATCAATGTCCATC | 5408 | TRESMSI | 7075 | 151.6105 |
| 430 | CAGCGGGGGGAGCTTCCTGCG | 5409 | QRGELPA | 7076 | 151.533 |
| 431 | TCGTCTGATCCTAAGGGGCAG | 5410 | SSDPKGQ | 7077 | 151.4265 |
| 432 | CCGAGTGATAGGACTACTTAT | 5411 | PSDRTTY | 7078 | 151.3695 |
| 433 | TCTTCTTCTGATAGTCCGCGT | 5412 | SSSDSPR | 7079 | 151.2845 |
| 434 | GTATTACACTCTGTATCAGCA | 5413 | VLHSVSA | 7080 | 151.217 |
| 435 | AGTATGCAATCATACACCATG | 5414 | SMQSYTM | 7081 | 151.1285 |
| 436 | TCTCTGCAACTCACAGCGGGT | 5415 | SLQLTAG | 7082 | 151.106 |
| 437 | AACAACGTAAACCCGTACTCG | 5416 | NNVNPYS | 7083 | 151.0935 |
| 438 | CTTGCGAATGGTATGACGGCT | 5417 | LANGMTA | 7084 | 150.9825 |
| 439 | GGAATCACAGGATCAACAGGA | 5418 | GITGSTG | 7085 | 150.979 |
| 440 | ATGCTTGTTCAGAATACTCCT | 5419 | MLVQNTP | 7086 | 150.943 |
| 441 | GATGCGAATGCGGGTACGAGG | 5420 | DANAGTR | 7087 | 150.871 |
| 442 | GAAACCGGAGCTATGACCTCT | 5421 | ETGAMTS | 7088 | 150.803 |
| 443 | ATACAAACTACTACAAAATGC | 5422 | IQTTTKC | 7089 | 150.692 |
| 444 | GCGCAGCAGAGTCTTCATGGT | 5423 | AQQSLHG | 7090 | 150.673 |
| 445 | ATTGATAGTACTTGGAATACG | 5424 | IDSTWNT | 7091 | 150.518 |
| 446 | ACCGAATCGCAAACCATGAGG | 5425 | TESQTMR | 7092 | 150.4394 |
| 447 | TTGATCCAAACGCAAGGCACG | 5426 | LIQTQGT | 7093 | 150.329 |
| 448 | ATAGTAAACATAACTCAATCG | 5427 | IVNITQS | 7094 | 150.305 |
| 449 | GTGGCGGTGTCTAATACGCCT | 5428 | VAVSNTP | 7095 | 150.03285 |
| 450 | GGTCATAGGGATTCGGGTGGT | 5429 | GHRDSGG | 7096 | 149.991 |
| 451 | CGGAATGAGAATCTTAATAAT | 5430 | RNENLNN | 7097 | 149.913 |
| 452 | GTCATGCAACGATCTGCACAA | 5431 | VMQRSAQ | 7098 | 149.77 |
| 453 | GTCTCGGGTCCGGTATCGGTC | 5432 | VSGPVSV | 7099 | 149.7645 |
| 454 | GGGGATATTCAGAGTCATAGT | 5433 | GDIQSHS | 7100 | 149.392 |
| 455 | GTTGAGAAGCCTCTGGAGACT | 5434 | VEKPLET | 7101 | 149.24 |
| 456 | GGTGTTCAGATGACTGCGGGG | 5435 | GVQMTAG | 7102 | 149.14805 |
| 457 | ACCACAAAAACGACATCTATG | 5436 | TTKTTSM | 7103 | 149.0935 |
| 458 | CCTGGGAATCCGTCTAGTAAT | 5437 | PGNPSSN | 7104 | 148.9075 |
| 459 | GCTTCGCGGCCTGCGGCTCAG | 5438 | ASRPAAQ | 7105 | 148.8831 |
| 460 | GTTCATGATCAGGGGGCTGGG | 5439 | VHDQGAG | 7106 | 148.829 |
| 461 | TCAGGTTCGGAATACCGTACC | 5440 | SGSEYRT | 7107 | 148.812 |
| 462 | TACGTGGACGACAACAGTCGC | 5441 | YVDDNSR | 7108 | 148.744 |
| 463 | ATGGCCGGTGACCAAGAACTC | 5442 | MAGDQEL | 7109 | 148.7 |
| 464 | CCTTTGCACAACATACCTCCT | 5443 | PLHNIPP | 7110 | 148.609 |
| 465 | AGTGGGATTGGTACTTATTCT | 5444 | SGIGTYS | 7111 | 148.357 |
| 466 | TCGAACGCAGACATCCTCGCC | 5445 | SNADILA | 7112 | 148.08 |
| 467 | AGTCACAACCAAGTAAACGTA | 5446 | SHNQVNV | 7113 | 147.981 |
| 468 | CAGCATTCTCCGAAGCCGGTT | 5447 | QHSPKPV | 7114 | 147.97 |
| 469 | TCCGCAAACAACATAGCCCCC | 5448 | SANNIAP | 7115 | 147.813 |
| 470 | GAAGAAACACGGACCAGAATG | 5449 | EETRTRM | 7116 | 147.667 |
| 471 | CTGTCTAATTCGATTACGCCT | 5450 | LSNSITP | 7117 | 147.594 |
| 472 | AGTGCTTTGAATAGTGTGGAT | 5451 | SALNSVD | 7118 | 147.326 |
| 473 | ACTAATCTTGCTGTTACGCTG | 5452 | TNLAVTL | 7119 | 147.1589 |
| 474 | CAGTCGACGCTGAATAGGCCT | 5453 | QSTLNRP | 7120 | 147.0302 |
| 475 | ATAGAACACATGCTTAGACCC | 5454 | IEHMLRP | 7121 | 146.9635 |
| 476 | CCGACTCCTAATGAGCATATG | 5455 | PTPNEHM | 7122 | 146.84 |
| 477 | ATTAATGAGATTGGTAGGATG | 5456 | INEIGRM | 7123 | 146.786 |
| 478 | AACAACGACAACGTCTACGTG | 5457 | NNDNVYV | 7124 | 146.764 |
| 479 | ATAGTCCACACCCCGCAAGTG | 5458 | IVHTPQV | 7125 | 146.309 |
| 480 | CATAAGAGTGAGAGTCATAAT | 5459 | HKSESHN | 7126 | 146.142 |
| 481 | TCATCGTCAGACTCACCCAGA | 5460 | SSSDSPR | 7127 | 146.067 |
| 482 | TACTCTACAGAAGCACGAGTC | 5461 | YSTEARV | 7128 | 145.9845 |
| 483 | ACCTCGGGTGACCGGTACACG | 5462 | TSGDRYT | 7129 | 145.963 |
| 484 | GAGAAGAATCTGACTAATGCT | 5463 | EKNLTNA | 7130 | 145.88775 |
| 485 | ACAAGGGACCAAAGGTCTACA | 5464 | TRDQRST | 7131 | 145.8855 |
| 486 | GCGACTGATAAGATGACTCCT | 5465 | ATDKMTP | 7132 | 145.881 |
| 487 | AATAGTTATACTGCTGGGAAG | 5466 | NSYTAGK | 7133 | 145.87565 |
| 488 | ACGCTGGATACTAAGGATCTT | 5467 | TLDTKDL | 7134 | 145.82 |
| 489 | GCATCCAACGGGCAAGTTAAC | 5468 | ASNGQVN | 7135 | 145.7395 |
| 490 | ACCTCAATATCGTCGCAAAGC | 5469 | TSISSQS | 7136 | 145.707 |
| 491 | GATAATAGTCCTGCTAATCAT | 5470 | DNSPANH | 7137 | 145.5712 |
| 492 | AACTCCAGGGAAATGGGTGTA | 5471 | NSREMGV | 7138 | 145.562 |
| 493 | ACCAGCGCGTCTGAAAACTGG | 5472 | TSASENW | 7139 | 145.56 |
| 494 | ACTGTAGGATCCTCATACGCT | 5473 | TVGSSYA | 7140 | 145.0453 |
| 495 | CAACAATCACAAAACTCTATA | 5474 | QQSQNSI | 7141 | 144.9825 |
| 496 | CTTCGGGATGGGATTGCTTCT | 5475 | LRDGIAS | 7142 | 144.9725 |
| 497 | GTGCAAAAAACGACGGCTTGG | 5476 | VQKTTAW | 7143 | 144.78 |
| 498 | ATGAGTACGGTTCTTCGGGAG | 5477 | MSTVLRE | 7144 | 144.5125 |
| 499 | AGTATGGATGCTCGGTTGACG | 5478 | SMDARLT | 7145 | 144.404 |
| 500 | GGCGCCCGTACAATCTTAGAC | 5479 | GARTILD | 7146 | 144.3975 |
| 501 | CACGAAAGCCACTACGTGTCA | 5480 | HESHYVS | 7147 | 144.2755 |
| 502 | CTTGAGGGTCAGAATAAGACG | 5481 | LEGQNKT | 7148 | 144.137 |
| 503 | CGGGACTTGAGACCCGTGACG | 5482 | RDLRPVT | 7149 | 143.788 |
| 504 | CAGATTTTGAATTATAGTGTG | 5483 | QILNYSV | 7150 | 143.741 |
| 505 | ATAAGTGTAGGTGTGTCCGTA | 5484 | ISVGVSV | 7151 | 143.727 |
| 506 | AAGGCGGGTGAGTATAGGGAT | 5485 | KAGEYRD | 7152 | 143.693 |
| 507 | CTTACTACGAATGGTATGCTG | 5486 | LTTNGML | 7153 | 143.66 |
| 508 | ACTAGTAATTATATGCATGAG | 5487 | TSNYMHE | 7154 | 143.642 |
| 509 | ACCCACAACTCTACAGGCCTT | 5488 | THNSTGL | 7155 | 143.502 |
| 510 | AATAATGTTGTTAGGGATGAT | 5489 | NNVVRDD | 7156 | 143.142 |
| 511 | AGTGGGACGTATGCTAGTCGT | 5490 | SGTYASR | 7157 | 143.123 |
| 512 | CTGTCTCACGCCATGGACCGG | 5491 | LSHAMDR | 7158 | 142.937 |
| 513 | AATTGGAATTCTGAGGGTACG | 5492 | NWNSEGT | 7159 | 142.7425 |
| 514 | AGTCTGCGTCCAACCCTACCT | 5493 | SLRPTLP | 7160 | 142.4292 |
| 515 | TACCAAACGGGAGACAAAGAC | 5494 | YQTGDKD | 7161 | 142.104 |
| 516 | CGCAGCGACAAAGGAACGTTG | 5495 | RSDKGTL | 7162 | 142.1004 |
| 517 | TCTACCATCGGCAACAGCACG | 5496 | STIGNST | 7163 | 142.0895 |
| 518 | GAAAACAACATGCAACACGGC | 5497 | ENNMQHG | 7164 | 142.037 |
| 519 | AAGTATACGGAGTCGAATGCG | 5498 | KYTESNA | 7165 | 142.0295 |
| 520 | CCAACAAACAACTTAAGTATG | 5499 | PTNNLSM | 7166 | 141.91 |
| 521 | TGCAAAAACAACTCAGAATGC | 5500 | CKNNSEC | 7167 | 141.874 |
| 522 | ACGGTTAATGCGGATGGGTCG | 5501 | TVNADGS | 7168 | 141.672 |
| 523 | TTTTCTGGTCAGGCGTTGGCT | 5502 | FSGQALA | 7169 | 141.6645 |
| 524 | AATCATATTAGGAATCCTATG | 5503 | NHIRNPM | 7170 | 141.628 |
| 525 | ATGGTGAATTCGGAGAATACT | 5504 | MVNSENT | 7171 | 141.624 |
| 526 | ACTGATGGGCCGCGTCTGGCT | 5505 | TDGPRLA | 7172 | 141.5814 |
| 527 | TTCAACGGGTACGTCATGGCA | 5506 | FNGYVMA | 7173 | 141.042 |
| 528 | AATGCGAATGGGCCTGTGAGT | 5507 | NANGPVS | 7174 | 141.0385 |
| 529 | AGTACGAGTCAGGAGAATAGG | 5508 | STSQENR | 7175 | 140.9233 |
| 530 | CAAGGGACTCTCTTGTCTCCA | 5509 | QGTLLSP | 7176 | 140.773 |
| 531 | CTAATCACAGCCACCACTAAC | 5510 | LITATTN | 7177 | 140.4315 |
| 532 | TCTGGCGTCTCGAAAGAACGG | 5511 | SGVSKER | 7178 | 140.3655 |
| 533 | TCTACTTCAATAGGAGTGGTA | 5512 | STSIGVV | 7179 | 140.351 |
| 534 | TCTCATGTGACTGTTACGGAT | 5513 | SHVTVTD | 7180 | 140.31 |
| 535 | TCTAATAATCTGAATCAGGAG | 5514 | SNNLNQE | 7181 | 140.282 |
| 536 | GCAAACCACGACAACATCGTG | 5515 | ANHDNIV | 7182 | 140.0405 |
| 537 | GACACGTCCTCCGGCAACAGG | 5516 | DTSSGNR | 7183 | 140.01 |
| 538 | GTGGTTCCTATGCCTACTACT | 5517 | VVPMPTT | 7184 | 139.945 |
| 539 | CTTACTAATAATTTTAAGGAT | 5518 | LTNNFKD | 7185 | 139.782 |
| 540 | TCTTCGCCTACTAAGGGTACT | 5519 | SSPTKGT | 7186 | 139.7594 |
| 541 | GATATTCCGTCTGATAATACG | 5520 | DIPSDNT | 7187 | 139.44 |
| 542 | TACACGGGATTCGAATTGAGA | 5521 | YTGFELR | 7188 | 139.43 |
| 543 | AACTCAGGTAACAACCCCATC | 5522 | NSGNNPI | 7189 | 139.4185 |
| 544 | ACGACCCGAAACGAACACTCG | 5523 | TTRNEHS | 7190 | 139.3175 |
| 545 | AATGTGGGTAATACTCTTGGG | 5524 | NVGNTLG | 7191 | 139.128 |
| 546 | TACCACACCCACCAAGTCGCA | 5525 | YHTHQVA | 7192 | 138.871 |
| 547 | GGTAGTGCGAGTAATAGTGGT | 5526 | GSASNSG | 7193 | 138.841 |
| 548 | GGGAAGAATCAGCCTACTCCG | 5527 | GKNQPTP | 7194 | 138.839 |
| 549 | TTCACCGCCACTTTAGGAACC | 5528 | FTATLGT | 7195 | 138.809 |
| 550 | ATGAACCAAATGGGCGGCCTG | 5529 | MNQMGGL | 7196 | 138.794 |
| 551 | AACGTGTCACTAACGCAAACG | 5530 | NVSLTQT | 7197 | 138.62365 |
| 552 | TCGTCTAGCAACACAAACGCT | 5531 | SSSNTNA | 7198 | 138.538 |
| 553 | ACTAATTCTAATCAGAGTTCG | 5532 | TNSNQSS | 7199 | 138.513 |
| 554 | ATAAGTCACGACCTTAAATAC | 5533 | ISHDLKY | 7200 | 138.4685 |
| 555 | GATTCGACGTATGTTTTGGCT | 5534 | DSTYVLA | 7201 | 138.402 |
| 556 | ATGAACACCGGCTCTTCGAGT | 5535 | MNTGSSS | 7202 | 138.35 |
| 557 | GCCGGAAACTACCAATCATCA | 5536 | AGNYQSS | 7203 | 138.2335 |
| 558 | ACGATTTATAATATGGGTCCG | 5537 | TIYNMGP | 7204 | 138.1385 |
| 559 | GTATCAACGACAACGGACCGG | 5538 | VSTTTDR | 7205 | 137.9925 |
| 560 | GGGGTGACTGTTAGGGAGCTT | 5539 | GVTVREL | 7206 | 137.96205 |
| 561 | GATATTACTAATCAGTCGTAT | 5540 | DITNQSY | 7207 | 137.802 |
| 562 | AATCAGTCGCTTACTATGGAT | 5541 | NQSLTMD | 7208 | 137.363 |
| 563 | ACGAATTATAATATTGGTCCG | 5542 | TNYNIGP | 7209 | 137.0645 |
| 564 | CGTGGTACGGAGGGGACGCCG | 5543 | RGTEGTP | 7210 | 137.0621 |
| 565 | CCCATAACACGGGAATCGGGA | 5544 | PITRESG | 7211 | 136.943 |
| 566 | ACCGGACAAGCGGGCGGATCG | 5545 | TGQAGGS | 7212 | 136.857 |
| 567 | ATGACTAAACACGACGCGACG | 5546 | MTKHDAT | 7213 | 136.624 |
| 568 | CCTATACCCCACGGTTCATCC | 5547 | PIPHGSS | 7214 | 136.299 |
| 569 | ACGACTGGGGGGACGGGGATG | 5548 | TTGGTGM | 7215 | 136.1295 |
| 570 | CTAACCGAATCTGTGAGAAAC | 5549 | LTESVRN | 7216 | 135.933 |
| 571 | AGTAGTAATCTGACTTTGTCT | 5550 | SSNLTLS | 7217 | 135.86 |
| 572 | TTGAATAATTCTGCGACTGTT | 5551 | LNNSATV | 7218 | 135.76 |
| 573 | GCATACGGATCGTCCGGAAGA | 5552 | AYGSSGR | 7219 | 135.5095 |
| 574 | GTTTCTTATGATAATGGGTCG | 5553 | VSYDNGS | 7220 | 135.48 |
| 575 | CCGAGTCAGAGTAGGTCGCTT | 5554 | PSQSRSL | 7221 | 135.38455 |
| 576 | GTCCTGGTTAACGTACACAAC | 5555 | VLVNVHN | 7222 | 135.346 |
| 577 | TTGATGACTGGTACTGCGTCG | 5556 | LMTGTAS | 7223 | 135.327 |
| 578 | GCTGCTGGTAATCCTACTCGT | 5557 | AAGNPTR | 7224 | 135.3067 |
| 579 | TCCGCGCAATCTTTCGTAGTT | 5558 | SAQSFVV | 7225 | 134.721 |
| 580 | CAAGACCAAACGAGCAACCGT | 5559 | QDQTSNR | 7226 | 134.721 |
| 581 | CAGTCGATTGGGCATCCGGTG | 5560 | QSIGHPV | 7227 | 134.625 |
| 582 | GCTGGGGTGCGTGAGTCGTTT | 5561 | AGVRESF | 7228 | 134.586 |
| 583 | AATACTAATTATGCGATGCAT | 5562 | NTNYAMH | 7229 | 134.493 |
| 584 | GAGCGGAGTACGCATAATGTT | 5563 | ERSTHNV | 7230 | 134.479 |
| 585 | ATGTCCGGATCCATGATATCA | 5564 | MSGSMIS | 7231 | 134.414 |
| 586 | TCTGGCCAAGGATTCTCGGCA | 5565 | SGQGFSA | 7232 | 134.3465 |
| 587 | ACATTCACTACTCTGGGCAAA | 5566 | TFTTLGK | 7233 | 134.2015 |
| 588 | GACGCAAACGCTGGCACAAGA | 5567 | DANAGTR | 7234 | 134.063 |
| 589 | AGGGATACGGCTAAGGGGGTG | 5568 | RDTAKGV | 7235 | 133.882 |
| 590 | GTGCGGTCTGGTAATAAGCCG | 5569 | VRSGNKP | 7236 | 133.87 |
| 591 | CCCCAATGGGGAACTGACCCG | 5570 | PQWGTDP | 7237 | 133.743 |
| 592 | GCCTTCCAAAACACCGGCGCA | 5571 | AFQNTGA | 7238 | 133.743 |
| 593 | GCGACGACTCAGCTGATGACT | 5572 | ATTQLMT | 7239 | 133.675 |
| 594 | ACGAACGCGAGCGAAGGCTCA | 5573 | TNASEGS | 7240 | 133.642 |
| 595 | ATGCTCACAGAAACCAAAGCA | 5574 | MLTETKA | 7241 | 133.57 |
| 596 | ACGAATAATTTGCTGGCTCAG | 5575 | TNNLLAQ | 7242 | 133.517 |
| 597 | GATGTTTTGCTTAAGAATTTT | 5576 | DVLLKNF | 7243 | 133.49 |
| 598 | TATACGCCTGGGCTTACTGAG | 5577 | YTPGLTE | 7244 | 133.356 |
| 599 | CGGCATGCTTCGGATGCTAAT | 5578 | RHASDAN | 7245 | 133.22 |
| 600 | AGTAAGGGTGATCAGCTTAAT | 5579 | SKGDQLN | 7246 | 133.1865 |
| 601 | GTGCTGGTTACTCAGAATCAT | 5580 | VLVTQNH | 7247 | 133.0645 |
| 602 | CGACAAGGCGACTTAAAAGAA | 5581 | RQGDLKE | 7248 | 132.97895 |
| 603 | ATTCAGTCGCAGTCGCAGTTG | 5582 | IQSQSQL | 7249 | 132.832 |
| 604 | AAAATAGAAAGCGGAACCATA | 5583 | KIESGTI | 7250 | 132.825 |
| 605 | ACAACTCTTAGCCAACAAAGC | 5584 | TTLSQQS | 7251 | 132.567 |
| 606 | TTTCAGTTGGCTAGTAATCCG | 5585 | FQLASNP | 7252 | 132.4465 |
| 607 | TGGATTTCTACTGAGATGAGG | 5586 | WISTEMA | 7253 | 132.356 |
| 608 | GCCATAACAATCACTCAAAAA | 5587 | AITITQK | 7254 | 132.1895 |
| 609 | GTTACTGGTGTTGATTATGCG | 5588 | VTGVDYA | 7255 | 131.7275 |
| 610 | ATAATAGCATCCTCTACCACG | 5589 | IIASSTT | 7256 | 131.506 |
| 611 | ATTTATACGAATAGTCATGTT | 5590 | IYTNSHV | 7257 | 131.43 |
| 612 | AACGACATCCCCACACGAGCC | 5591 | NDIPTRA | 7258 | 131.424 |
| 613 | GGCGTAACCAACGCTTCCAAA | 5592 | GVTNASK | 7259 | 131.404 |
| 614 | AGGGGTAACACTCTCGAAATG | 5593 | RGNTLEM | 7260 | 131.381 |
| 615 | GGTATTAATCATGTGGCGTCT | 5594 | GINHVAS | 7261 | 131.36 |
| 616 | TTCAACGAAACTGCCGGGCGA | 5595 | FNETAGR | 7262 | 131.2915 |
| 617 | GCCTCGCAATCAGAAAAAAAC | 5596 | ASQSEKN | 7263 | 131.243 |
| 618 | GAACTTAACGAAAGGAACCTC | 5597 | ELNERNL | 7264 | 131.06 |
| 619 | GGAGAACAAAGCCACAACCAA | 5598 | GEQSHNQ | 7265 | 130.951 |
| 620 | TTGACTAATGATAATAAGTTG | 5599 | LTNDNKL | 7266 | 130.846 |
| 621 | TCTTATGGGCAGGGTCTGGAG | 5600 | SYGQGLE | 7267 | 130.8108 |
| 622 | CACAGTGACATGGGCTCAAGC | 5601 | HSDMGSS | 7268 | 130.758 |
| 623 | GCGTTAAAATCCGACAGCGCC | 5602 | ALKSDSA | 7269 | 130.684 |
| 624 | ACGAATCTTTCTCCTAAGACG | 5603 | TNLSPKT | 7270 | 130.64725 |
| 625 | GCTGATACGAATATTATTGTG | 5604 | ADTNIIV | 7271 | 130.47 |
| 626 | AGTGAGGGTAGTTCGCGGTCG | 5605 | SEGSSRS | 7272 | 130.30865 |
| 627 | AACTCTAGTAACACTGGTTGG | 5606 | NSSNTGW | 7273 | 130.26 |
| 628 | GTAACGAACGAATCCCGCGCC | 5607 | VTNESRA | 7274 | 130.2145 |
| 629 | GGGCGGCACACATTAGCGGAC | 5608 | GRHTLAD | 7275 | 130.1035 |
| 630 | GCTGTTGTGAATGTTGCGCAG | 5609 | AVVNVAQ | 7276 | 130.094 |
| 631 | AAAAAACCACAACAGTGACTA | 5610 | KKPQQ*L | 7277 | 130.08 |
| 632 | GGCAACGCTTCCGGAAACCCA | 5611 | GNASGNP | 7278 | 129.97 |
| 633 | TTTGCGGCTGGGGCGCATGGT | 5612 | FAAGAHG | 7279 | 129.69 |
| 634 | GGAGGAAACCAAAACCTTACT | 5613 | GGNQNLT | 7280 | 129.6198 |
| 635 | CATACGCAGTCGACGGGTTAT | 5614 | HTQSTGY | 7281 | 129.541 |
| 636 | CTATTGGGAAACGCACCCACA | 5615 | LLGNAPT | 7282 | 129.534 |
| 637 | GAGAAGGGGAATAGTGGGGTT | 5616 | EKGNSGV | 7283 | 129.5155 |
| 638 | GGCACGGAACCGCGCACTGCA | 5617 | GTEPRTA | 7284 | 129.37 |
| 639 | ATGCATGCGCAGGAGTCTCGT | 5618 | MHAQESR | 7285 | 129.14615 |
| 640 | CTGATTTCGACTGGTAATAAT | 5619 | LISTGNN | 7286 | 129.021 |
| 641 | AAGAATAATAATTCTGATTCT | 5620 | KNNNSDS | 7287 | 128.767 |
| 642 | GGGACATTAGCCTCAATGTCC | 5621 | GTLASMS | 7288 | 128.734 |
| 643 | AGGATTGATACGTTGTTGGTG | 5622 | RIDTLLV | 7289 | 128.385 |
| 644 | ATTTCGGGGTCTCATTTGAAT | 5623 | ISGSHLN | 7290 | 128.3305 |
| 645 | ACGGTTGAGGGTTCTTATCCG | 5624 | TVEGSYP | 7291 | 128.288 |
| 646 | ACGGAGTATCTGGCTGGTCTG | 5625 | TEYLAGL | 7292 | 128.224 |
| 647 | TATCTGGAGGGTGCTCATCGT | 5626 | YLEGAHR | 7293 | 128.166 |
| 648 | TTATCCGCAACATCTACGATG | 5627 | LSATSTM | 7294 | 128.1455 |
| 649 | ATGCTTAGTCAGGTTCTGACG | 5628 | MLSQVLT | 7295 | 128.142 |
| 650 | GCCAGGAACGTAATGCTGGGG | 5629 | ARNVMLG | 7296 | 128.128 |
| 651 | CTTCATGGGAATTTTAGTCAG | 5630 | LHGNFSQ | 7297 | 128.112 |
| 652 | GGCCACGGAAGTGACTTGACC | 5631 | GHGSDLT | 7298 | 128.0576 |
| 653 | GGTGTGAATTATCATACTACG | 5632 | GVNYHTT | 7299 | 127.702 |
| 654 | TATCTGCAGACGGGTACTCTG | 5633 | YLQTGTL | 7300 | 127.624 |
| 655 | GTAAACGGGGGAAAACCAGTC | 5634 | VNGGKPV | 7301 | 127.5325 |
| 656 | GAAGTAGGTAAAACCACCCAC | 5635 | EVGKTTH | 7302 | 127.5065 |
| 657 | CGACCCCCGAACGAAAACAGA | 5636 | RPPNENR | 7303 | 127.49235 |
| 658 | GTGGATAAGAATCATCCTTTG | 5637 | VDKNHPL | 7304 | 127.431 |
| 659 | AGTAAGTCGACTGAGATTATG | 5638 | SKSTEN' | 7305 | 127.281 |
| 660 | ACCGCTCTTCTATCTAACTTA | 5639 | TALLSNL | 7306 | 127.228 |
| 661 | ATGCACACAAGTAGACCCCCA | 5640 | MHTSRPP | 7307 | 126.861 |
| 662 | ACTCCAACTAACGGGAACCCT | 5641 | TPTNGNP | 7308 | 126.785 |
| 663 | ACGACGTCTGTGGAGAAGACT | 5642 | TTSVEKT | 7309 | 126.7725 |
| 664 | CAATACGACGCCAGCCGACAA | 5643 | QYDASRQ | 7310 | 126.66 |
| 665 | TACAACGCCCACGAATCATTC | 5644 | YNAHESF | 7311 | 126.521 |
| 666 | GACAACCAACAAGCCCTAGCT | 5645 | DNQQALA | 7312 | 126.49 |
| 667 | ACGAAGAGTTTTAATGATCTT | 5646 | TKSFNDL | 7313 | 126.488 |
| 668 | TTAGCCGACTCAAACAGCAAA | 5647 | LADSNSK | 7314 | 126.48 |
| 669 | CCGAGTACTCATGGGTATGTT | 5648 | PSTHGYV | 7315 | 126.4775 |
| 670 | CAGGTTCAGGGGACTCTGGGG | 5649 | QVQGTLG | 7316 | 126.4394 |
| 671 | CTGACTGCTGTTGCGATTAGT | 5650 | LTAVAIS | 7317 | 126.235 |
| 672 | AGGTATGAGAGTACTAGTGCT | 5651 | RYESTSA | 7318 | 126.21 |
| 673 | GCGGATCATAATCATATTGCT | 5652 | ADHNHIA | 7319 | 126.21 |
| 674 | TGGAATGCTGAGAATAGTAAG | 5653 | WNAENSK | 7320 | 126.112 |
| 675 | AACTCTGTCGTAGGGAACATC | 5654 | NSVVGNI | 7321 | 126.111 |
| 676 | TTCGGAGCAACCACCACAGCA | 5655 | FGATTTA | 7322 | 126.048 |
| 677 | GCTTCAGGGTCTGAAATGCCT | 5656 | ASGSEMF | 7323 | 125.971 |
| 678 | GACGGAACAAAAAGCGGAATG | 5657 | DGTKSGM | 7324 | 125.871 |
| 679 | TACACCGCCGACAAAAAACAA | 5658 | YTADKKQ | 7325 | 125.562 |
| 680 | CCGATTGCTGAGAGGCCTTCT | 5659 | PIAERPS | 7326 | 125.558 |
| 681 | AGCAACTCGTACTTACTCAAC | 5660 | SNSYLLN | 7327 | 125.52 |
| 682 | ACGAGAGAATTGACAAAAAAC | 5661 | TRELTKN | 7328 | 125.47 |
| 683 | CTCGGAAACCACTACACACCC | 5662 | LGNHYTP | 7329 | 125.444 |
| 684 | TTGCTCCAATCCATAGTGGTA | 5663 | LLQSIVV | 7330 | 125.441 |
| 685 | ATGATGGCGAATAATATGCAG | 5664 | MMANNMQ | 7331 | 125.38 |
| 686 | GGCGCGGACACCTCGACCCGG | 5665 | GADTSTR | 7332 | 125.369 |
| 687 | GGGTTCGGGCACGTGCCCGAA | 5666 | GFGHVPE | 7333 | 125.324 |
| 688 | AACGTTATGCACTCTTCCTCC | 5667 | NVMHSSS | 7334 | 125.313 |
| 689 | TCTGCGTCGAAAGTGGAATAC | 5668 | SASKVEY | 7335 | 125.2945 |
| 690 | ATTTCGAGTTATGATGGTAAT | 5669 | ISSYDGN | 7336 | 125.273 |
| 691 | AAAAAAACGAAAACACTAACT | 5670 | KKTKTLT | 7337 | 125.26 |
| 692 | GGTACCATATTACCAAACCAA | 5671 | GTILPNQ | 7338 | 125.236 |
| 693 | TTAAACGTCGTACCAACACAA | 5672 | LNVVPTQ | 7339 | 125.09 |
| 694 | AGTAGTGTTACTTCGAGGGAG | 5673 | SSVTSRE | 7340 | 124.987 |
| 695 | CCCATCAACGTACTCACGACA | 5674 | PINVLTT | 7341 | 124.911 |
| 696 | GGGGATAAGGCGAGTTTGGCG | 5675 | GDKASLA | 7342 | 124.8255 |
| 697 | AGGATGTCGGAGAGTTCTGAT | 5676 | RMSESSD | 7343 | 124.5625 |
| 698 | AATCTTTTGACTTCGTCGCCT | 5677 | NLLTSSP | 7344 | 124.54 |
| 699 | TCGCGGCTATCACAAGACCCC | 5678 | SRLSQDP | 7345 | 124.3495 |
| 700 | TGGTCGAATGCTCAGAGTCCG | 5679 | WSNAQSP | 7346 | 124.231 |
| 701 | GGCAGACACCTTCAATCGGAC | 5680 | GRHLQSD | 7347 | 124.19 |
| 702 | ATGAGTCTCGCCTCCACCCAA | 5681 | MSLASTQ | 7348 | 124.092 |
| 703 | ATGAGTACGGTTCTTCGCGAG | 5682 | MSTVLRE | 7349 | 124.05 |
| 704 | TCTAAATCTGAAAACCTGCAA | 5683 | SKSENLQ | 7350 | 124.043 |
| 705 | TGGACGGAAGGGGGCTCAGGA | 5684 | WTEGGSG | 7351 | 124 |
| 706 | TCGACTACGGTTTGGACTGCT | 5685 | STTVWTA | 7352 | 123.99 |
| 707 | GTTAGTTTGGAGAGTCGGTTG | 5686 | VSLESRL | 7353 | 123.799 |
| 708 | TCTATGTATGGGCAGGCTGGG | 5687 | SMYGQAG | 7354 | 123.777 |
| 709 | ACTAATACGCAGAATAATCCG | 5688 | TNTQNNP | 7355 | 123.702 |
| 710 | GTCGGTGACAGGAACTTGGTC | 5689 | VGDRNLV | 7356 | 123.663 |
| 711 | CTCGCCCACAACTACTTAAGC | 5690 | LAHNYLS | 7357 | 123.6175 |
| 712 | TGGACAGCTAACCAAGGCTTA | 5691 | WTANQGL | 7358 | 123.566 |
| 713 | GTCTTCCGGGAAGGCATCGTG | 5692 | VFREGIV | 7359 | 123.54 |
| 714 | CAGGTGCAGCATGAGAGGGTG | 5693 | QVQHERV | 7360 | 123.5 |
| 715 | CAAATATTAAACTACTCAGTC | 5694 | QILNYSV | 7361 | 123.4 |
| 716 | AGTACGATTGGTAATTCTACT | 5695 | STIGNST | 7362 | 123.3029 |
| 717 | CCTATACACCACGGTTCATCC | 5696 | PIHHGSS | 7363 | 123.09 |
| 718 | ATTGCTACTAATGTGATTTAT | 5697 | IATNVIY | 7364 | 123.055 |
| 719 | CAAGGCGGTACAAACAACCCC | 5698 | QGGTNNP | 7365 | 123.037 |
| 720 | ACCCGTGGCAACGACATATCA | 5699 | TRGNDIS | 7366 | 123.023 |
| 721 | CAAACGCTCATAGTGGGGTCC | 5700 | QTLIVGS | 7367 | 123.007 |
| 722 | CGGGGTCTGCCTGATGTTAAT | 5701 | RGLPDVN | 7368 | 122.952 |
| 723 | CTTAATGTGAATACGCTTAAT | 5702 | LNVNTLN | 7369 | 122.896 |
| 724 | GGGACAAAAAGCTGGCCTGTC | 5703 | GTKSWPV | 7370 | 122.8432 |
| 725 | ACGCATCTTGTGAGTGATTCG | 5704 | THLVSDS | 7371 | 122.78 |
| 726 | TGGACGGGCGCACAACCTTCT | 5705 | WTGAQPS | 7372 | 122.73955 |
| 727 | TCTGCGATGCACACATTAGTC | 5706 | SAMHTLV | 7373 | 122.5735 |
| 728 | TCCCAACACCACACGCCACTG | 5707 | SQHHTPL | 7374 | 122.4691 |
| 729 | GATAATCGGATGGAGGCTACG | 5708 | DNRMEAT | 7375 | 122.416 |
| 730 | TTGGGAGGAACCCTGGGAATA | 5709 | LGGTLGI | 7376 | 122.38 |
| 731 | TTTCATAATGAGTCTTATGGG | 5710 | FHNESYG | 7377 | 122.36 |
| 732 | ATTCGGACTTCTGTGATTAAT | 5711 | IRTSVIN | 7378 | 122.333 |
| 733 | TATAATACTGTTGATCAGCGG | 5712 | YNTVDQR | 7379 | 122.2905 |
| 734 | GCGCACCAAACCGCCGGGCCA | 5713 | AHQTAGP | 7380 | 122.22 |
| 735 | CCTCCGGAAAGTGCCAGGGGC | 5714 | PPESARG | 7381 | 122.2044 |
| 736 | AATAATACTTTGAATATTTTG | 5715 | NNTLNIL | 7382 | 122.18 |
| 737 | GCTAGTTATAGTAGTATGGTG | 5716 | ASYSSMV | 7383 | 122.0975 |
| 738 | TCGGGTCAAAACGGTACATCA | 5717 | SGQNGTS | 7384 | 122.017 |
| 739 | TTGTCTAGTATGAGTACGGAT | 5718 | LSSMSTD | 7385 | 121.935 |
| 740 | GTCGCCTCGATGGTACACAAC | 5719 | VASMVHN | 7386 | 121.8215 |
| 741 | ACGCAATTGTCAGACGGCTGC | 5720 | TQLSDGC | 7387 | 121.81 |
| 742 | GCGATTGTGGATAGGGGGAGT | 5721 | AIVDRGS | 7388 | 121.757 |
| 743 | AACCGTCAAAGGGACTTCGAA | 5722 | NRQRDFE | 7389 | 121.734 |
| 744 | GCACACCAAAAAGACATACGC | 5723 | AHQKDIR | 7390 | 121.7 |
| 745 | TTCACCGAACGCGCACTCCAA | 5724 | FTERALQ | 7391 | 121.6915 |
| 746 | ATGCTGTCTCATGGTGCGCTT | 5725 | MLSHGAL | 7392 | 121.682 |
| 747 | TCCGTAACCAACGGAGCGGAA | 5726 | SVTNGAE | 7393 | 121.549 |
| 748 | ATCACCGCCGCGTCACCGCAA | 5727 | ITAASPQ | 7394 | 121.5325 |
| 749 | CAAAACACGCAACGATACTTG | 5728 | QNTQRYL | 7395 | 121.5036 |
| 750 | ACTGGCCAAGGATTCTCGGCA | 5729 | TGQGFSA | 7396 | 121.45 |
| 751 | AGTTTTGAGAAGAATGGTATT | 5730 | SFEKNGI | 7397 | 121.45 |
| 752 | CTCACGTCCCACTCTGCGGGC | 5731 | LTSHSAG | 7398 | 121.378 |
| 753 | TCTACAATCGGCAACAGCACG | 5732 | STIGNST | 7399 | 121.27 |
| 754 | GGTCTTAGTCGGAATGATGGT | 5733 | GLSRNDG | 7400 | 121.2415 |
| 755 | TCGACGACGCACCCTTCCGAA | 5734 | STTHPSE | 7401 | 121.238 |
| 756 | CCAAGTACGAACGAAAGCCGC | 5735 | PSTNESR | 7402 | 121.099 |
| 757 | GGTACGAAGGATATTCTGATT | 5736 | GTKDILI | 7403 | 121.039 |
| 758 | TCTACTATTAATATGCGTGCG | 5737 | STINMRA | 7404 | 120.929 |
| 759 | TATATTGCTGGGGGGGAGCAG | 5738 | YIAGGEQ | 7405 | 120.9 |
| 760 | TCCAGCGGCCAACCGCTCGTC | 5739 | SSGQPLV | 7406 | 120.7415 |
| 761 | GACAAACAACAAACCGGACAA | 5740 | DKQQTGQ | 7407 | 120.6775 |
| 762 | GGGCTAGGACAACCCCAACTC | 5741 | GLGQPQL | 7408 | 120.644 |
| 763 | AGTCCGCAGCATGGTGTTATT | 5742 | SPQHGVI | 7409 | 120.6145 |
| 764 | TATAGGGGTAGGGAGGATTGG | 5743 | YRGREDW | 7410 | 120.58 |
| 765 | GCGGGGGGTTTGCTGTCGCGG | 5744 | AGGLLSR | 7411 | 120.552 |
| 766 | CCGATACAACAAGCCTCATTG | 5745 | PIQQASL | 7412 | 120.375 |
| 767 | TGGAGCGCCGGCGAACGGGTG | 5746 | WSAGERV | 7413 | 120.3415 |
| 768 | AGGGGTGATGTTGCTACGACG | 5747 | RGDVATT | 7414 | 120.26 |
| 769 | TTAACGGGACAAAACGAATTC | 5748 | LTGQNEF | 7415 | 120.24 |
| 770 | ACGACGCCGCCTTTTTCTAAT | 5749 | TTPPFSN | 7416 | 120.2205 |
| 771 | ACGAGTATTGGTAGTGCTAAG | 5750 | TSIGSAK | 7417 | 120.195 |
| 772 | AATGTGCAGAATGTGCCTGGG | 5751 | NVQNVPG | 7418 | 120.16215 |
| 773 | TATACGGGTACTCTTGTTGTT | 5752 | YTGTLVV | 7419 | 120.047 |
| 774 | GGAACCCACGCCTCAGCATAC | 5753 | GTHASAY | 7420 | 119.959 |
| 775 | CTGGTTGTTTCGAATAGTCTG | 5754 | LVVSNSL | 7421 | 119.934 |
| 776 | ACGCATCTTGTGAGGGATTCG | 5755 | THLVRDS | 7422 | 119.7893 |
| 777 | AATCATGGTCGTGCTATTGAT | 5756 | NHGRAID | 7423 | 119.776 |
| 778 | CCCAAAACTCTAACTTCGACA | 5757 | PKTLTST | 7424 | 119.754 |
| 779 | TTCGGTATAGGGCACGGAACA | 5758 | FGIGHGT | 7425 | 119.734 |
| 780 | GCGCTTCCGTCTCGTGAGCGG | 5759 | ALPSRER | 7426 | 119.7235 |
| 781 | GCGACTAGGGGTGAGTCGTCT | 5760 | ATRGESS | 7427 | 119.715 |
| 782 | GGGACAACCGAAGTTAACAAA | 5761 | GTTEVNK | 7428 | 119.685 |
| 783 | ACCCACACCCTTGGGGGAACA | 5762 | THTLGGT | 7429 | 119.68 |
| 784 | GAAGCAGTAACAAGTAAATGG | 5763 | EAVTSKW | 7430 | 119.6575 |
| 785 | CACTACGGTAACAAAGACATA | 5764 | HYGNKDI | 7431 | 119.643 |
| 786 | ATTTCTACGCATACGATGACG | 5765 | ISTHTMT | 7432 | 119.64 |
| 787 | GATACGTATAATAGTAATACT | 5766 | DTYNSNT | 7433 | 119.6 |
| 788 | GTTTTTACTGGGCAGACGGAG | 5767 | VFTGQTE | 7434 | 119.544 |
| 789 | TCGGTCACCAGTGGAACACAA | 5768 | SVTSGTQ | 7435 | 119.502 |
| 790 | CATACGTATTCGCAGGCTGAT | 5769 | HTYSQAD | 7436 | 119.47455 |
| 791 | GTAGCGGGCTTAGTCGACATA | 5770 | VAGLVDI | 7437 | 119.41 |
| 792 | GACTCTACCAAAGCCATGCAA | 5771 | DSTKAMQ | 7438 | 119.403 |
| 793 | GAGGGGCATAATCGTGGTATT | 5772 | EGHNRGI | 7439 | 119.354 |
| 794 | GGGTTGCATGGGACGAGTAAT | 5773 | GLHGTSN | 7440 | 119.343 |
| 795 | CCGCTTTCTCTTCATAATAGT | 5774 | PLSLHNS | 7441 | 119.312 |
| 796 | GCGAGTGATAAGGGGGCGAAT | 5775 | ASDKGAN | 7442 | 119.249 |
| 797 | GTGCTGTTGCAGAATTCTCAT | 5776 | VLLQNSH | 7443 | 119.2225 |
| 798 | CTATACGACGGAAAACACGTC | 5777 | LYDGKHV | 7444 | 119.20995 |
| 799 | ACCCAAGGATCTAACACCACA | 5778 | TQGSNTT | 7445 | 119.08 |
| 800 | TTCCTCGACAAATACAACTAC | 5779 | FLDKYNY | 7446 | 119.058 |
| 801 | GACACCGGAATCAAAAACGTT | 5780 | DTGIKNV | 7447 | 119.05 |
| 802 | TCCGGAGCGGCACAAAACCCA | 5781 | SGAAQNP | 7448 | 119.019 |
| 803 | ACCCTCCACACCAAAGACCTA | 5782 | TLHTKDL | 7449 | 118.854 |
| 804 | GCTACTTACGTTGTCGGAACA | 5783 | ATYVVGT | 7450 | 118.84 |
| 805 | CTTGTGGGGACTTTGGTGTAT | 5784 | LVGTLVY | 7451 | 118.809 |
| 806 | TCTAATACGACTGTGCAGCTT | 5785 | SNTTVQL | 7452 | 118.76 |
| 807 | AAGGCTCAGATTAATCAGATG | 5786 | KAQINQM | 7453 | 118.727 |
| 808 | CGGAATGCTACTGTGACTGTT | 5787 | RNATVTV | 7454 | 118.655 |
| 809 | GCAACCAGAGTGGGCAACCAC | 5788 | ATRVGNH | 7455 | 118.599 |
| 810 | AGTTATCAGAATCCTCCGCCT | 5789 | SYQNPPP | 7456 | 118.512 |
| 811 | TTTGATAGTTATAATATTGTG | 5790 | FDSYNIV | 7457 | 118.51 |
| 812 | GCTACTCTTTCTCCGCATGCT | 5791 | ATLSPHA | 7458 | 118.497 |
| 813 | TGGGAGAGTCCGACTAATGCG | 5792 | WESPTNA | 7459 | 118.49 |
| 814 | ATCGAAAACGTAAACCACTTG | 5793 | IENVNHL | 7460 | 118.42 |
| 815 | TATCGGGCTTCGGATGTGGCG | 5794 | YRASDVA | 7461 | 118.372 |
| 816 | CATATGTCTTCTGTTGCGACT | 5795 | HMSSVAT | 7462 | 118.34 |
| 817 | ATCCAAAGAGACGTGGGCCAC | 5796 | IQRDVGH | 7463 | 118.2825 |
| 818 | GAGAGTGTTAGGGAGACTATT | 5797 | ESVRETI | 7464 | 118.25 |
| 819 | CAGGGGGGGAATAGTCGGTTT | 5798 | QGGNSRF | 7465 | 118.236 |
| 820 | GAAAAAGGCACACCAAGTAGC | 5799 | EKGTPSS | 7466 | 118.233 |
| 821 | CACGACAGCACAACCCGCCCA | 5800 | HDSTTRP | 7467 | 118.225 |
| 822 | TTACCAACAGGCGTCCTGCCC | 5801 | LPTGVLP | 7468 | 118.2065 |
| 823 | ACCCTAGGCTACCCAGACAAA | 5802 | TLGYPDK | 7469 | 118.1855 |
| 824 | GCTAACACCGTCACAGAACGA | 5803 | ANTVTER | 7470 | 118.17415 |
| 825 | CACGACAAATCTATCCAACCA | 5804 | HDKSIQP | 7471 | 118.16 |
| 826 | GGAGGAACAGCCCTTGGGAGC | 5805 | GGTALGS | 7472 | 118.123 |
| 827 | GGGGGTAACTACCACACCACT | 5806 | GGNYHTT | 7473 | 118.046 |
| 828 | ATCTCAGAAATGACTAGGTAC | 5807 | ISEMTRY | 7474 | 118.041 |
| 829 | GTTGAATCTAAATCCGAACCA | 5808 | VESKSEP | 7475 | 118.026 |
| 830 | GACCGTGCCCAAAACAACGAA | 5809 | DRAQNNE | 7476 | 118.006 |
| 831 | ACGGCGCAGACCGGCTGGGTT | 5810 | TAQTGWV | 7477 | 117.96 |
| 832 | GGGTTCGGGCACCTGCCCGAA | 5811 | GFGHLPE | 7478 | 117.86 |
| 833 | CCTATTACGGGTTTTAGTGTT | 5812 | PITGFSV | 7479 | 117.828 |
| 834 | GATAGGACGTATTCGAATACG | 5813 | DRTYSNT | 7480 | 117.7875 |
| 835 | ATGTCAAACGCCTCCTACATA | 5814 | MSNASYI | 7481 | 117.743 |
| 836 | GATAATAGTAGGCCTGAGGTG | 5815 | DNSRPEV | 7482 | 117.658 |
| 837 | TCAAGTTCCCAAACGGTTTTG | 5816 | SSSQTVL | 7483 | 117.655 |
| 838 | AGTAATCTTGATGGTACTATT | 5817 | SNLDGTI | 7484 | 117.643 |
| 839 | AGTAATATGCGTGAGGAGATT | 5818 | SNMREEI | 7485 | 117.629 |
| 840 | AGACTTACAGAACTGGTCATA | 5819 | RLTELVI | 7486 | 117.583 |
| 841 | CAGGTTAGTCTGGTGAAGTTG | 5820 | QVSLVKL | 7487 | 117.558 |
| 842 | GAAATACACACGACCACAGGC | 5821 | EIHTTTG | 7488 | 117.5505 |
| 843 | AGCAGGATAGAAAACAACAAC | 5822 | SRIENNN | 7489 | 117.5425 |
| 844 | GGAACAGGCAAAGAAGTTCGA | 5823 | GTGKEVR | 7490 | 117.521 |
| 845 | TGGCAGGATCATAATAAGGTG | 5824 | WQDHNKV | 7491 | 117.476 |
| 846 | TCGACAAACTCTATAGGCGCC | 5825 | STNSIGA | 7492 | 117.414 |
| 847 | TCCGAATTAATGGTCAGACCC | 5826 | SELMVRP | 7493 | 117.3623 |
| 848 | CCGCTTCAGAATAATAAGACG | 5827 | PLQNNKT | 7494 | 117.2175 |
| 849 | CCTTATGCGAATAGGCTTGAG | 5828 | PYANRLE | 7495 | 117.21145 |
| 850 | GGGACGGTTTCGCTTATTCCT | 5829 | GTVSLIP | 7496 | 117.175 |
| 851 | GATGTTTATCTTAAGAGTCCG | 5830 | DVYLKSP | 7497 | 117.1435 |
| 852 | TTGCCGGATAAGGGGCGGATT | 5831 | LPDKGRI | 7498 | 117.116 |
| 853 | TCGATAACGACCGTAGCGAAC | 5832 | SITTVAN | 7499 | 117.112 |
| 854 | CCGCTTCAATCCCAATCGGGA | 5833 | PLQSQSG | 7500 | 117.1045 |
| 855 | AATAATATGGGTCATGGTCAT | 5834 | NNMGHGH | 7501 | 117.0365 |
| 856 | AGCGGACAAAAAAACTCAGAA | 5835 | SGQKNSE | 7502 | 116.9665 |
| 857 | ACCGAAGCGGGCCGCCCCCAA | 5836 | TEAGRPQ | 7503 | 116.907 |
| 858 | ACCTTACACACGAAAGACTTG | 5837 | TLHTKDL | 7504 | 116.879 |
| 859 | CTTCGAGACCTAAACGGAGGA | 5838 | LRDLNGG | 7505 | 116.8691 |
| 860 | GTTTGTGTTACTACTTGTGCT | 5839 | VCVTTCA | 7506 | 116.861 |
| 861 | GTCACAGCTGCTCAACCCCAA | 5840 | VTAAQPQ | 7507 | 116.79 |
| 862 | GCGACTTTTAGTCATGCTGGT | 5841 | ATFSHAG | 7508 | 116.788 |
| 863 | ACTTATGCGCCTAGGTCGCCT | 5842 | TYAPRSP | 7509 | 116.75715 |
| 864 | ACGTCGGAGATGCGTACTGCT | 5843 | TSEMRTA | 7510 | 116.5885 |
| 865 | TACTCGACAACCATGCTTAAC | 5844 | YSTTMLN | 7511 | 116.584 |
| 866 | TCTTTCACGAACACAAACCCA | 5845 | SFTNTNP | 7512 | 116.5665 |
| 867 | AGTCCTCCTAGTACGTCGGGT | 5846 | SPPSTSG | 7513 | 116.551 |
| 868 | GTGACGACTGTTGATAGTGCT | 5847 | VTTVDSA | 7514 | 116.477 |
| 869 | GAGGCGCATAATCGTGTTATT | 5848 | EAHNRVI | 7515 | 116.461 |
| 870 | ATGGAGTTGACTTCTACTAGT | 5849 | MELTSTS | 7516 | 116.456 |
| 871 | CATTTGGTTACTAGTGGTATT | 5850 | HLVTSGI | 7517 | 116.45 |
| 872 | CAAACCATCACCTCACAAATG | 5851 | QTITSQM | 7518 | 116.431 |
| 873 | ACTGCGAATAGTACGTATGTG | 5852 | TANSTYV | 7519 | 116.329 |
| 874 | CTTATCCAATTATCGGGTCAA | 5853 | LIQLSGQ | 7520 | 116.317 |
| 875 | TCTTACGTTAGCGTCCCCGCC | 5854 | SYVSVPA | 7521 | 116.3005 |
| 876 | GTGCATGGGAATGCTCCGGCT | 5855 | VHGNAPA | 7522 | 116.2665 |
| 877 | GCCGGAAAAACCCACGCCGAC | 5856 | AGKTHAD | 7523 | 116.228 |
| 878 | ACATTCCACCAAGGGGTCAAA | 5857 | TFHQGVK | 7524 | 116.175 |
| 879 | TTAGGAAACAACCGGCCACTA | 5858 | LGNNRPL | 7525 | 116.17 |
| 880 | CTGCACCTCGTCCGGAGCTTC | 5859 | LHLVRSF | 7526 | 116.08 |
| 881 | TCCTACAGTACTTCAACACCG | 5860 | SYSTSTP | 7527 | 116.036 |
| 882 | ATATCGCAAGGCTCGAGCCTC | 5861 | ISQGSSL | 7528 | 116.025 |
| 883 | CTCCAACTGGCTACATCCCAC | 5862 | LQLATSH | 7529 | 116.0035 |
| 884 | GTGACTCAGCGGTTTGCTGAG | 5863 | VTQRFAE | 7530 | 115.952 |
| 885 | GCTATAGACTCCATCAAAATG | 5864 | AIDSIKM | 7531 | 115.9415 |
| 886 | GACGCACACACTTTCAGCCGG | 5865 | DAHTFSR | 7532 | 115.93 |
| 887 | CGTGGTTCAGACGGAGGATTG | 5866 | RGSDGGL | 7533 | 115.911 |
| 888 | TTAGCACAAGGCACGGACCGG | 5867 | LAQGTDR | 7534 | 115.884 |
| 889 | AAAAACAACAACTCAGACAGT | 5868 | KNNNSDS | 7535 | 115.7595 |
| 890 | GAAAACGAAAAACGAGAAAGC | 5869 | ENEKRES | 7536 | 115.741 |
| 891 | AACGAACAATTCGAAAAAGTC | 5870 | NEQFEKV | 7537 | 115.705 |
| 892 | ACACAAGTAGTCGCAAGAACA | 5871 | TQVVART | 7538 | 115.68045 |
| 893 | GGAGTAAACGTCACCAACAGC | 5872 | GVNVTNS | 7539 | 115.64 |
| 894 | GCCGACAAAGGATTCGGCCAC | 5873 | ADKGFGH | 7540 | 115.5886 |
| 895 | ACTCATAAGCAGGTGGATCTT | 5874 | THKQVDL | 7541 | 115.54825 |
| 896 | TCGGCTAACTTATACAAACAA | 5875 | SANLYKQ | 7542 | 115.544 |
| 897 | AAGCTGCATACTAAGGATCTT | 5876 | KLHTKDL | 7543 | 115.54 |
| 898 | GTGGTGGTTCACACTATCCCA | 5877 | VVVHTIP | 7544 | 115.52 |
| 899 | TCTACGTCTCAGGCTGTGCAG | 5878 | STSQAVQ | 7545 | 115.496 |
| 900 | CGTAACGGCTCCGCCCAAAGC | 5879 | RNGSAQS | 7546 | 115.465 |
| 901 | CATTATGGGAATAAGGATATT | 5880 | HYGNKDI | 7547 | 115.402 |
| 902 | AGCTTCTTGGTAGCCCACCCA | 5881 | SFLVAHP | 7548 | 115.4 |
| 903 | CAGCAGAATACGAGTTTGCCG | 5882 | QQNTSLP | 7549 | 115.39 |
| 904 | ATGCACGTCGACAAAACGAGT | 5883 | MHVDKTS | 7550 | 115.379 |
| 905 | AATAATGAGAATACGCGTAAT | 5884 | NNENTRN | 7551 | 115.363 |
| 906 | TCGATAAACAACATAGGCGCA | 5885 | SINNIGA | 7552 | 115.3425 |
| 907 | GCTACTATATCGGACCGAGCC | 5886 | ATISDRA | 7553 | 115.327 |
| 908 | TACTCAAACCTCGTACTTTCC | 5887 | YSNLVLS | 7554 | 115.285 |
| 909 | ATGATGAATGTGAGTGGTCAT | 5888 | MMNVSGH | 7555 | 115.2555 |
| 910 | GGGGAGACGCGGTCGACTGCT | 5889 | GETRSTA | 7556 | 115.18 |
| 911 | ACGAAGGGTTATAATGATCTT | 5890 | TKGYNDL | 7557 | 115.1635 |
| 912 | GCGTATAATATGTCGTCTGTT | 5891 | AYNMSSV | 7558 | 115.148 |
| 913 | GCAGACCCCGCTAAAGGCAAA | 5892 | ADPAKGK | 7559 | 115.1435 |
| 914 | TATATTTCGGCGCCTCCGATG | 5893 | YISAPPM | 7560 | 115.1145 |
| 915 | CGAAACAACCCATCGCACGAC | 5894 | RNNPSHD | 7561 | 115.069 |
| 916 | GGAACCTCCATAGACTACGTA | 5895 | GTSIDYV | 7562 | 115.053 |
| 917 | GGCACCGGGTACCCAAACCAA | 5896 | GTGYPNQ | 7563 | 115.038 |
| 918 | GATCATATGAATTTGAGGTCT | 5897 | DHMNLRS | 7564 | 114.9475 |
| 919 | ATTAATTCGTATTTGCATGAG | 5898 | INSYLHE | 7565 | 114.887 |
| 920 | TGGCAAATGGGGGCCGGGAGC | 5899 | WQMGAGS | 7566 | 114.833 |
| 921 | ATGGGTATCGGGTCATACAAA | 5900 | MGIGSYK | 7567 | 114.827 |
| 922 | CAAAACCACAACGAACTAAAA | 5901 | QNHNELK | 7568 | 114.749 |
| 923 | GATAAGTCTAATTATAGTATT | 5902 | DKSNYSI | 7569 | 114.736 |
| 924 | ACAACGAAACCGGTCGCGGAA | 5903 | TTKPVAE | 7570 | 114.7315 |
| 925 | GTGACTGTGAGTAATAGTCTG | 5904 | VTVSNSL | 7571 | 114.685 |
| 926 | ACGGCGTATCTGGATGGTCTG | 5905 | TAYLDGL | 7572 | 114.665 |
| 927 | AATTTGCAGACTGGTGTTCAG | 5906 | NLQTGVQ | 7573 | 114.65 |
| 928 | ACCGTCGCTCCCTACAGTAGC | 5907 | TVAPYSS | 7574 | 114.65 |
| 929 | GTTCAGATTTCTATGAATAAT | 5908 | VQISMNN | 7575 | 114.617 |
| 930 | TACATAGCAGGTGGTGAACAA | 5909 | YIAGGEQ | 7576 | 114.60015 |
| 931 | TTCATGGAAGTCATGAAAAAC | 5910 | FMEVMKN | 7577 | 114.547 |
| 932 | ACGACTGATAAGGGTATTAAT | 5911 | TTDKGIN | 7578 | 114.539 |
| 933 | TTGAGCTACAGCATCCAACAC | 5912 | LSYSIQH | 7579 | 114.53 |
| 934 | GCTTATAATGCTCGTCTGCCT | 5913 | AYNARLP | 7580 | 114.49305 |
| 935 | AACACCGGCACCACGAGTGTC | 5914 | NTGTTSV | 7581 | 114.475 |
| 936 | GTGCTGAGTACGGGGCTGCGG | 5915 | VLSTGLR | 7582 | 114.4165 |
| 937 | AACGACTCCTCGTCAATGTCC | 5916 | NDSSSMS | 7583 | 114.397 |
| 938 | CGCCAAGGCAGCTTGATGATA | 5917 | RQGSLMI | 7584 | 114.37 |
| 939 | ATCAGCACCGCATACATGTTG | 5918 | ISTAYML | 7585 | 114.36 |
| 940 | GGTACTATGAATATTGGTATT | 5919 | GTMNIGI | 7586 | 114.356 |
| 941 | CATAATAATAATTTGCTGAAT | 5920 | HNNNLLN | 7587 | 114.292 |
| 942 | CATTTTTCGCAGATTACTAAT | 5921 | HFSQITN | 7588 | 114.278 |
| 943 | GACCTGACCAGAGCTGCAATA | 5922 | DLTRAAI | 7589 | 114.256 |
| 944 | GTCGCTATGGGAGGCGGTCCC | 5923 | VAMGGGP | 7590 | 114.1845 |
| 945 | GCCTACGGTATCAGAGAAGTG | 5924 | AYGIREV | 7591 | 114.1465 |
| 946 | ACATCAGACGGTCTACTAAGT | 5925 | TSDGLLS | 7592 | 114.128 |
| 947 | ACGATGGCTACAAACTTAAGT | 5926 | TMATNLS | 7593 | 114.082 |
| 948 | AACAACGGCAACTCATCAAGG | 5927 | NNGNSSR | 7594 | 114.047 |
| 949 | ACGGAGAAGGCGAGTCCTCTG | 5928 | TEKASPL | 7595 | 114.031 |
| 950 | CTCAACCACACAATGCCCCTC | 5929 | LNHTMPL | 7596 | 114.027 |
| 951 | GATACGGCGAGTTATAATAAT | 5930 | DTASYNN | 7597 | 114 |
| 952 | AACATGACCAACGAACGGCTC | 5931 | NMTNERL | 7598 | 113.9675 |
| 953 | GTAGTCTCATCGGGCGGCTGG | 5932 | VVSSGGW | 7599 | 113.966 |
| 954 | GTGAATCAGAGTCCTGGGGCT | 5933 | VNQSPGA | 7600 | 113.85 |
| 955 | GATCATCATCCTCAGAGTCGT | 5934 | DHRPQSR | 7601 | 113.83 |
| 956 | CGATGGCAAGGACTGAGCGCG | 5935 | RWQGLSA | 7602 | 113.76 |
| 957 | GCGGTTACGACAAGCGTGAGG | 5936 | AVTTSVR | 7603 | 113.752 |
| 958 | TGGGGAGTCAGTAACTCAGCA | 5937 | WGVSNSA | 7604 | 113.7505 |
| 959 | GCGCATATGCATTCGGAGTTG | 5938 | AHMESEL | 7605 | 113.74 |
| 960 | AATAATCTTACGAATTCGACG | 5939 | NNLTNST | 7606 | 113.736 |
| 961 | AGTAGTGGGGGTATGAAGGCG | 5940 | SSGGMKA | 7607 | 113.69 |
| 962 | GTTGGGTATGGGGAGCATGTT | 5941 | VGYGEHV | 7608 | 113.64 |
| 963 | ACCATAGTGTCCACTTCTTAC | 5942 | TIVSTSY | 7609 | 113.628 |
| 964 | CCCACCAGTCACCAAGAACCC | 5943 | PTSHQEP | 7610 | 113.62 |
| 965 | TCTAACCTTCGAAACACAATA | 5944 | SNLRNTI | 7611 | 113.58 |
| 966 | TCAAGACACGACGTCCGAAAC | 5945 | SRHDVRN | 7612 | 113.559 |
| 967 | CAGATGAATATTCATGATAAG | 5946 | QMNIHDK | 7613 | 113.543 |
| 968 | TGGGCTATGAATAATGTGCCG | 5947 | WAMNNVP | 7614 | 113.531 |
| 969 | GCGATGGATGGGTATAGGGTT | 5948 | AMDGYRV | 7615 | 113.462 |
| 970 | AAAGGGGGAAACCTCACCGCA | 5949 | KGGNLTA | 7616 | 113.4525 |
| 971 | ATTGGTAAGGATAGTGTTCCG | 5950 | IGKDSVP | 7617 | 113.448 |
| 972 | GTGCAGTTGACGCATAATGGG | 5951 | VQLTHNG | 7618 | 113.43 |
| 973 | GGCCTGAACCAGATCACATCG | 5952 | GLNQITS | 7619 | 113.4 |
| 974 | AGGGGTGATCCTTCTACGCCT | 5953 | RGDPSTP | 7620 | 113.4 |
| 975 | GTTCCCTCCGACCCCCACTGG | 5954 | VPSDPHW | 7621 | 113.35 |
| 976 | ACGTTAAGTTCCCAAGTCACA | 5955 | TLSSQVT | 7622 | 113.327 |
| 977 | AACCAAAGAGTTGAACAAAAA | 5956 | NQRVEQK | 7623 | 113.3075 |
| 978 | GTACTTCCAAGTCGGATCGCG | 5957 | VLPSRIA | 7624 | 113.3 |
| 979 | GGGCACTACGCTACAAACACA | 5958 | GHYATNT | 7625 | 113.212 |
| 980 | CCTTCGATTCCGTCGTTTTCG | 5959 | PSIPSFS | 7626 | 113.207 |
| 981 | ACTTATGAGTATCCGACTCGG | 5960 | TYEYPTR | 7627 | 113.19 |
| 982 | AAAGACCACATCCTCAGCCTC | 5961 | KDHILSL | 7628 | 113.1795 |
| 983 | GGCACAGGAGGTAACCGAGAA | 5962 | GTGGNRE | 7629 | 113.173 |
| 984 | AAGGGGGATGGTGCTTATGAG | 5963 | KGDGAYE | 7630 | 113.162 |
| 985 | TCTTCTTTCGGAAAAGACAAC | 5964 | SSFGKDN | 7631 | 113.1603 |
| 986 | ACAGTATCGTCATACGTACAA | 5965 | TVSSYVQ | 7632 | 113.0595 |
| 987 | AGGGCTCATGGGGATAATCAG | 5966 | RAHGDNQ | 7633 | 113.036 |
| 988 | TATCATGCTCATAGTAATGAG | 5967 | YHAHSNE | 7634 | 113.03 |
| 989 | GCAAACTTGCCCAGCGGTCAC | 5968 | ANLPSGH | 7635 | 113.03 |
| 990 | GCGAACCTCAACTTGACCAGT | 5969 | ANLNLTS | 7636 | 113.015 |
| 991 | AGGCTTAATGCGGGTGAGCAT | 5970 | RLNAGEH | 7637 | 113.0105 |
| 992 | TATGTTGATTATAGTAAGTCG | 5971 | YVDYSKS | 7638 | 112.9935 |
| 993 | GCTAATTCTGGGTTGCATAAT | 5972 | ANSGLHN | 7639 | 112.9695 |
| 994 | ACGAGTGGTGTGCTTACGCGG | 5973 | TSGVLTR | 7640 | 112.9485 |
| 995 | GGAAAACCAGCACAAGAATTC | 5974 | GKPAQEF | 7641 | 112.933 |
| 996 | GTGGGGACGCATTTGCATTCG | 5975 | VGTHLHS | 7642 | 112.918 |
| 997 | CCGATGAACAAAGACATACTG | 5976 | PMNKDIL | 7643 | 112.9116 |
| 998 | GACGCCCACCACTCAAGCAGC | 5977 | DAHHSSS | 7644 | 112.88 |
| 999 | ACTAACGCCATCTCTCAAACG | 5978 | TNAISQT | 7645 | 112.7997 |
| 1000 | GTTTTGTCTGATAAGGCGTAT | 5979 | VLSDKAY | 7646 | 112.787 |
| 1001 | AACCTACTTGTCGACCAACGT | 5980 | NLLVDQR | 7647 | 112.78 |
| 1002 | ACTGGTCATCCGCCGGCGGCG | 5981 | TGHPPAA | 7648 | 112.7735 |
| 1003 | ATTAGTTCGGGGATTTTGTCG | 5982 | ISSGILS | 7649 | 112.7205 |
| 1004 | AATACGAATTTGTTGGGTTAT | 5983 | NTNLLGY | 7650 | 112.72 |
| 1005 | ACGCTATCGGTTACCCTGGGT | 5984 | TLSVTLG | 7651 | 112.71 |
| 1006 | CATACTGGTGTTCAGACTAAT | 5985 | HTGVQTN | 7652 | 112.704 |
| 1007 | GAGGTTAGTAATAATAATTAT | 5986 | EVSNNNY | 7653 | 112.69 |
| 1008 | CTGGCTAATATTTCGCTGTAT | 5987 | LANISLY | 7654 | 112.69 |
| 1009 | GTGGAGCATGTTGCTCATCAG | 5988 | VEHVAHQ | 7655 | 112.656 |
| 1010 | GTCGACAAAAGCGAAGCCGAC | 5989 | VDKSEAD | 7656 | 112.6 |
| 1011 | GGCTTCGCATTAACTGGCACC | 5990 | GFALTGT | 7657 | 112.564 |
| 1012 | TTGTTGACGGCTCCGCATAGG | 5991 | LLTAPHR | 7658 | 112.53 |
| 1013 | AATGCGGGGGCTCTTATGGGT | 5992 | NAGALMG | 7659 | 112.518 |
| 1014 | AGGACGCAAGCAGGGGACTCA | 5993 | RTQAGDS | 7660 | 112.483 |
| 1015 | AACACACACAGACAAGAATAC | 5994 | NTHRQEY | 7661 | 112.461 |
| 1016 | AACATAGCAGGCGGAGAACAA | 5995 | NIAGGEQ | 7662 | 112.442 |
| 1017 | GAGATTAATAATCGGACTGGT | 5996 | EINNRTG | 7663 | 112.43235 |
| 1018 | ACCGTTAACACAATGTACACG | 5997 | TVNTMYT | 7664 | 112.4 |
| 1019 | CCTATGAATGGTATTCTGTTG | 5998 | PMNGILL | 7665 | 112.388 |
| 1020 | AATCCTAGTTATGATCATCGG | 5999 | NPSYDHR | 7666 | 112.363 |
| 1021 | GCTGTTATTCTGAATCCTGTT | 6000 | AVILNPV | 7667 | 112.36 |
| 1022 | CTGTACGGGGGAGCACACCAA | 6001 | LYGGAHQ | 7668 | 112.3455 |
| 1023 | CAAGTCAACCAACCGAGAATA | 6002 | QVNQPRI | 7669 | 112.33 |
| 1024 | GCTGTTAGAACACCGGCAATG | 6003 | AVRTPAM | 7670 | 112.326 |
| 1025 | AGTTTGACGCCTAATAATCTT | 6004 | SLTPNNL | 7671 | 112.283 |
| 1026 | CTTGGGCAGGTTAATTCTACG | 6005 | LGQVNST | 7672 | 112.205 |
| 1027 | GCTAATTCTGCTACTAATCAG | 6006 | ANSATNQ | 7673 | 112.1605 |
| 1028 | TCCTTGACGGAAAAAGCGCCG | 6007 | SLTEKAP | 7674 | 112.15 |
| 1029 | CAATTCCACGGGACATCTGAA | 6008 | QFHGTSE | 7675 | 112.125 |
| 1030 | AAAAACGGCGCCATAGGAACA | 6009 | KNGAIGT | 7676 | 112.0867 |
| 1031 | GTGCTGGCGTCGACTGAGAAG | 6010 | VLASTEK | 7677 | 112.058 |
| 1032 | AGTAATATGAGTGAGGCGATT | 6011 | SNMSEAI | 7678 | 112.02 |
| 1033 | AACGCTAACGCCGGTGGAAAC | 6012 | NANAGGN | 7679 | 112.0148 |
| 1034 | CACTCTAACACACACTACGAA | 6013 | HSNTHYE | 7680 | 112.005 |
| 1035 | AGTGCTTTGATTAGTGTGGTT | 6014 | SALISVV | 7681 | 111.993 |
| 1036 | GTGGCGACTCATTATAATGAG | 6015 | VATHYNE | 7682 | 111.971 |
| 1037 | AACCAAACGTTACAAGTAGAC | 6016 | NQTLQVD | 7683 | 111.97 |
| 1038 | AAAACACCCTCAGCTTCAGAA | 6017 | KTPSASE | 7684 | 111.957 |
| 1039 | GGTGAATCACGTACAAACATG | 6018 | GESRTNM | 7685 | 111.9393 |
| 1040 | CGGAATGAGCCGGTTAGTACT | 6019 | RNEPVST | 7686 | 111.912 |
| 1041 | GCAACACACGCCATGCGCCCA | 6020 | ATHAMRP | 7687 | 111.9005 |
| 1042 | TGGGAATCCCTCTCCAACGCA | 6021 | WESLSNA | 7688 | 111.885 |
| 1043 | CATAGTCCTCCTACGACTATG | 6022 | HSPPTTM | 7689 | 111.847 |
| 1044 | TCTACCATGAACACGATCACG | 6023 | STMNTIT | 7690 | 111.8162 |
| 1045 | AACATGGAACACACCATGGCG | 6024 | NMEHTMA | 7691 | 111.78965 |
| 1046 | CATAATACGGAGTCTAAGACT | 6025 | HNTESKT | 7692 | 111.778 |
| 1047 | CACAACTTAATGACCCAAATA | 6026 | HNLMTQI | 7693 | 111.77 |
| 1048 | AACCAAAACACCTACGAACTG | 6027 | NQNTYEL | 7694 | 111.756 |
| 1049 | TACGCCACTCTCGACACCATC | 6028 | YATLDTI | 7695 | 111.752 |
| 1050 | GTTCAGTTGGAGAATGCGAAT | 6029 | VQLENAN | 7696 | 111.7215 |
| 1051 | GGGCTCACAGGATACACAATG | 6030 | GLTGYTM | 7697 | 111.71 |
| 1052 | TTAGTACTTGACTCACGGAAC | 6031 | LVLDSRN | 7698 | 111.704 |
| 1053 | ATGTTGGTACAAAACACACCC | 6032 | MLVQNTP | 7699 | 111.702 |
| 1054 | CCTCATAATCAGGAGATGGGT | 6033 | PHNQEMG | 7700 | 111.6865 |
| 1055 | TCGTTGGGGGATGCGATGTTG | 6034 | SLGDAML | 7701 | 111.6776 |
| 1056 | CGCGCCGAAGGGAGCTCTGGC | 6035 | RAEGSSG | 7702 | 111.6645 |
| 1057 | AGTGAGGAGAGGACGCGTGCG | 6036 | SEERTRA | 7703 | 111.616 |
| 1058 | TCTAGTAAGGAGCGTACATCG | 6037 | SSKERTS | 7704 | 111.57 |
| 1059 | CCTGTTGTGAGGGATCGTTCT | 6038 | PVVRDRS | 7705 | 111.5643 |
| 1060 | AGGATGTCTGAGAGTTCGGAT | 6039 | RMSESSD | 7706 | 111.51 |
| 1061 | AACCAATCTATAAGCATGGAC | 6040 | NQSISMD | 7707 | 111.491 |
| 1062 | GTCGCTGTATCGAACACTCCA | 6041 | VAVSNTP | 7708 | 111.482 |
| 1063 | GGAGACATCTCAAGCAGAAAC | 6042 | GDISSRN | 7709 | 111.4603 |
| 1064 | GCTGCCGGAGCCGACTCTCCA | 6043 | AAGADSP | 7710 | 111.429 |
| 1065 | TTCGGCACATCGTACACAACC | 6044 | FGTSYTT | 7711 | 111.401 |
| 1066 | CGTGATACTAATACGGATAAG | 6045 | RDTNTDK | 7712 | 111.336 |
| 1067 | GGGTCTACGCCGGGGGCGAGT | 6046 | GSTPGAS | 7713 | 111.327 |
| 1068 | GGTACTAATCATGATTTTTCG | 6047 | GTNHDFS | 7714 | 111.302 |
| 1069 | AATGAGAGTACGAAGGAGAGT | 6048 | NESTKES | 7715 | 111.2845 |
| 1070 | GTGCATGTGACTAATGTGTTG | 6049 | VHVTNVL | 7716 | 111.2295 |
| 1071 | AGTACTACTAATGTTGCGTAT | 6050 | STTNVAY | 7717 | 111.2015 |
| 1072 | ATTACGTCGTTGAATGGGATG | 6051 | ITSLNGM | 7718 | 111.1615 |
| 1073 | GAAGTACGGGGCAGCGTGCCA | 6052 | EVRGSVP | 7719 | 111.1435 |
| 1074 | GCACTTACCCGTATGCCTAAC | 6053 | ALTRMPN | 7720 | 111.1235 |
| 1075 | CTCAGTGTAGCCGACAGGCCA | 6054 | LSVADRP | 7721 | 111.06 |
| 1076 | GTTTCTACGGCGCAGAGGCAG | 6055 | VSTAQRQ | 7722 | 111.056 |
| 1077 | TTAAACGCAGAATACACCAAC | 6056 | LNAEYTN | 7723 | 111.02 |
| 1078 | AATGAGAAGCCGCAGTCGACG | 6057 | NEKPQST | 7724 | 111.009 |
| 1079 | TTGAATACGCTGATTGATAAG | 6058 | LNTLIDK | 7725 | 111.003 |
| 1080 | GTCACACACACACTGATCGAA | 6059 | VTHTLIE | 7726 | 110.987 |
| 1081 | GAGCAGAAGAAGACTGATCAT | 6060 | EQKKTDH | 7727 | 110.936 |
| 1082 | ACATCAGGCATGTACGACACG | 6061 | TSGMYDT | 7728 | 110.92 |
| 1083 | CCTGACGCAGCGCGTAGCCCG | 6062 | PDAARSP | 7729 | 110.916 |
| 1084 | TTGACGCAGGTTTATCATGAG | 6063 | LTQVYHE | 7730 | 110.91 |
| 1085 | AGAGAAATGAGCAGCCTATCT | 6064 | REMSSLS | 7731 | 110.891 |
| 1086 | ATGCCTTCGAAAGGCGAAGTA | 6065 | MPSKGEV | 7732 | 110.816 |
| 1087 | AATGAGCAGAATACGCCGAGT | 6066 | NEQNTPS | 7733 | 110.79 |
| 1088 | AAAAACTACGCAAGCACCGAC | 6067 | KNYASTD | 7734 | 110.7435 |
| 1089 | TGTATGGATGTTGGTAAGGCG | 6068 | CMDVGKA | 7735 | 110.711 |
| 1090 | GCTCTTCATAATCTGATGAAT | 6069 | ALHNLMN | 7736 | 110.711 |
| 1091 | CCTGACAGAGCGAACGACAAA | 6070 | PDRANDK | 7737 | 110.6835 |
| 1092 | ATTGCTCATGTGTCTACTAAT | 6071 | IAHVSTN | 7738 | 110.6805 |
| 1093 | AACGGTCCGACCGGATCCGCC | 6072 | NGPTGSA | 7739 | 110.6652 |
| 1094 | TCTACTCATCATGCTGATCGT | 6073 | STHHADR | 7740 | 110.629 |
| 1095 | GGTTCGCAGTATGGGCGGCAT | 6074 | GSQYGRH | 7741 | 110.629 |
| 1096 | ACCGGAACGGCTACACTCCCA | 6075 | TGTATLP | 7742 | 110.5825 |
| 1097 | AAAGCCCACGTTGTAGAAATA | 6076 | KAHVVEI | 7743 | 110.5795 |
| 1098 | ACTTCGCAGGGTAGGAGTCCT | 6077 | TSQGRSP | 7744 | 110.511 |
| 1099 | TTATCCTCCGAATCACCCAGG | 6078 | LSSESPR | 7745 | 110.5015 |
| 1100 | ACCGGGGTTCGAGAAACCATA | 6079 | TGVRETI | 7746 | 110.4575 |
| 1101 | ATGGATACTGAGCTTTATAGG | 6080 | MDTELYR | 7747 | 110.4475 |
| 1102 | ACACCTGAAGCGAGCGCTCGC | 6081 | TPEASAR | 7748 | 110.44 |
| 1103 | CACGACTTGAACCACGGAAAA | 6082 | HDLNHGK | 7749 | 110.428 |
| 1104 | CTTACTGGTCAGAATGCGATT | 6083 | LTGQNAI | 7750 | 110.416 |
| 1105 | ACCGTCGGATCGAACAGTATA | 6084 | TVGSNSI | 7751 | 110.411 |
| 1106 | CATACTGTGGGGGCTATGCAT | 6085 | HTVGAMH | 7752 | 110.41 |
| 1107 | GAACGAGTCAACGGGATGGCA | 6086 | ERVNGMA | 7753 | 110.405 |
| 1108 | TCCGAACCCCTTAGAGTTGGA | 6087 | SEPLRVG | 7754 | 110.3725 |
| 1109 | GTCTCTAACGTCCTCTACAGC | 6088 | VSNVLYS | 7755 | 110.346 |
| 1110 | TTCTCCTCCGGAACAACCATA | 6089 | FSSGTTI | 7756 | 110.3 |
| 1111 | ACAAACCTAAGTCAATCGGCC | 6090 | TNLSQSA | 7757 | 110.24435 |
| 1112 | CCTAATACTGCTAGTAATTTT | 6091 | PNTASNF | 7758 | 110.2274 |
| 1113 | TGCGGCCTGAACTGCGGTAAA | 6092 | CGLNCGK | 7759 | 110.211 |
| 1114 | CCGACCGGAGGCTCACCACCA | 6093 | PTGGSPP | 7760 | 110.201 |
| 1115 | TACCTAGAATCCAACTACACC | 6094 | YLESNYT | 7761 | 110.18 |
| 1116 | ACATTAGAAACAACCCGCAGC | 6095 | TLETTRS | 7762 | 110.167 |
| 1117 | TCCGCTAACGAACACAACCAC | 6096 | SANEHNH | 7763 | 110.137 |
| 1118 | GCACGAGTGGACACCAACCAA | 6097 | ARVDTNQ | 7764 | 110.09 |
| 1119 | AACGTGGTGAAAAACAACACA | 6098 | NVVKNNT | 7765 | 110.077 |
| 1120 | GGTTCTTATTCTGATGGTAGT | 6099 | GSYSDGS | 7766 | 110.0355 |
| 1121 | CCCGGTAACGGACAAAGTCCG | 6100 | PGNGQSP | 7767 | 110.0275 |
| 1122 | TCGGGGGTAAACTTCGGAGTA | 6101 | SGVNFGV | 7768 | 109.998 |
| 1123 | CGAATCAACGCAGCAATCGAC | 6102 | RINAAID | 7769 | 109.99675 |
| 1124 | CAAGCTGGGAACGCGCCAAGG | 6103 | QAGNAPR | 7770 | 109.98825 |
| 1125 | CAGTCGGGGTCTCTGGTGCCG | 6104 | QSGSLVP | 7771 | 109.962 |
| 1126 | TTCTCAACGCAAGACATAAGC | 6105 | FSTQDIS | 7772 | 109.948 |
| 1127 | GTGAATCCGCATCCTGCGCAG | 6106 | VNPHPAQ | 7773 | 109.948 |
| 1128 | AAAGGCCACGCCTACGAAGCC | 6107 | KGHAYEA | 7774 | 109.897 |
| 1129 | GAAGACAGTATGAGATTCTCT | 6108 | EDSMRFS | 7775 | 109.874 |
| 1130 | GGTAGGAATGAGAGTCCGGAG | 6109 | GRNESPE | 7776 | 109.855 |
| 1131 | TCCGACGGATCGAAACTACTA | 6110 | SDGSKLL | 7777 | 109.8205 |
| 1132 | ACTCTCTCAGGCTACATGAGA | 6111 | TLSGYMR | 7778 | 109.808 |
| 1133 | GATATTCATAATCCGCGTACG | 6112 | DIHNPRT | 7779 | 109.789 |
| 1134 | TGGGCCAAAGACGTCAACGTC | 6113 | WAKDVNV | 7780 | 109.782 |
| 1135 | GCTGTGGGGCGGTCGGATGAT | 6114 | AVGRSDD | 7781 | 109.711 |
| 1136 | AAAGAAAAAACCACCCGCGAA | 6115 | KEKTTRE | 7782 | 109.697 |
| 1137 | CTGCTCCAATCGACCTACTTG | 6116 | LLQSTYL | 7783 | 109.672 |
| 1138 | AAGTCTAATTTGGAGGGTAAG | 6117 | KSNLEGK | 7784 | 109.6285 |
| 1139 | ACGAGGACGCCTTTTCTGGGG | 6118 | TRTPFLG | 7785 | 109.613 |
| 1140 | CAGTCGGATACGACTTCGATT | 6119 | QSDTTSI | 7786 | 109.605 |
| 1141 | GCGTGGTCTCAAGTCCTGACG | 6120 | AWSQVLT | 7787 | 109.587 |
| 1142 | ACTCAAGAACGACCACTAATC | 6121 | TQERPLI | 7788 | 109.56 |
| 1143 | GATGATAAGACTGGTCGGTAT | 6122 | DDKTGRY | 7789 | 109.549 |
| 1144 | TTTCCTTCGCATAATGGGGCG | 6123 | FPSHNGA | 7790 | 109.54 |
| 1145 | ATGCTGTCTCAAGTCTTAACA | 6124 | MLSQVLT | 7791 | 109.536 |
| 1146 | TCTGTGACGACTAATCTGATG | 6125 | SVTTNLM | 7792 | 109.484 |
| 1147 | GAACACAACTCAAAAACTTAC | 6126 | EHNSKTY | 7793 | 109.4745 |
| 1148 | TATGCGCATCCTGTGACTCAT | 6127 | YAHPVTH | 7794 | 109.4635 |
| 1149 | CCTAATCCGTCTCCGAGGCAG | 6128 | PNPSPRQ | 7795 | 109.449 |
| 1150 | CATATGGGTTTGAATGAGCTT | 6129 | HMGLNEL | 7796 | 109.427 |
| 1151 | AACAGTTTGCAAGCAAGTGCA | 6130 | NSLQASA | 7797 | 109.402 |
| 1152 | GACCTCGGTACGGCTAGAACC | 6131 | DLGTART | 7798 | 109.388 |
| 1153 | TACGACAGCCGACTCTACGCG | 6132 | YDSRLYA | 7799 | 109.3853 |
| 1154 | CCGAAGCCTGGGACGGGGGAG | 6133 | PKPGTGE | 7800 | 109.3721 |
| 1155 | AGTCTGAATGGGGTGTTGGTT | 6134 | SLNGVLV | 7801 | 109.3685 |
| 1156 | CAGTCTAATTTGGTTATTAAT | 6135 | QSNLVIN | 7802 | 109.359 |
| 1157 | GCGTCTCCGGCGCAGACCGGC | 6136 | ASPAQTG | 7803 | 109.331 |
| 1158 | AACATGACCAACGAAAACGGA | 6137 | NMTNENG | 7804 | 109.324 |
| 1159 | TCACTTCGGACGGACGAATTC | 6138 | SLRTDEF | 7805 | 109.31815 |
| 1160 | ATATTGGACAACCACCGTTTC | 6139 | ILDNHRF | 7806 | 109.2685 |
| 1161 | TTGATTAATATGAGTCAGAAT | 6140 | LINMSQN | 7807 | 109.264 |
| 1162 | CCGCAAGACGTCCGCCAAACA | 6141 | PQDVRQT | 7808 | 109.2625 |
| 1163 | CCCTTCGTAGCGAACGAACCA | 6142 | PFVANEP | 7809 | 109.256 |
| 1164 | AATATTAATGATACTAAGAAT | 6143 | NINDTKN | 7810 | 109.253 |
| 1165 | AATTTTAGTAGTGGTGATGTT | 6144 | NFSSGDV | 7811 | 109.229 |
| 1166 | GAACGAAACGGACTAATAGAA | 6145 | ERNGLIE | 7812 | 109.215 |
| 1167 | AATTCTCATGTTCCTAATAAT | 6146 | NSHVPNN | 7813 | 109.2115 |
| 1168 | AACACAACCGGTAGCTCGGGC | 6147 | NTTGSSG | 7814 | 109.1925 |
| 1169 | TCAACCAGAAAAGAACACGAC | 6148 | STRKEHD | 7815 | 109.1875 |
| 1170 | GCTGCTAATCCTAGTACGGAG | 6149 | AANPSTE | 7816 | 109.1357 |
| 1171 | TCGGGTATGAATAGTAATAAG | 6150 | SGMNSNK | 7817 | 109.129 |
| 1172 | AAGACGCTTGATAATAATGCT | 6151 | KTLDNNA | 7818 | 109.09305 |
| 1173 | ACCGTAAAACAAACAAGTCCG | 6152 | TVKQTSP | 7819 | 109.0863 |
| 1174 | ATTTCTCAGGTGTCTTTTAAT | 6153 | ISQVSFN | 7820 | 109.082 |
| 1175 | TTAGAAGTAAACCTGCAAACG | 6154 | LEVNLQT | 7821 | 109.057 |
| 1176 | GAAATGCAAACCAAAAACGCC | 6155 | EMQTKNA | 7822 | 109.052 |
| 1177 | GCCGACAACAGAAACGACAAA | 6156 | ADNRNDK | 7823 | 109.008 |
| 1178 | GCGTATGATACGCTGAATAGT | 6157 | AYDTLNS | 7824 | 108.982 |
| 1179 | ACGATTCAGGATCATATTAAG | 6158 | TIQDHIK | 7825 | 108.942 |
| 1180 | GACCCCACTAAAGTTGGATCC | 6159 | DPTKVGS | 7826 | 108.939 |
| 1181 | TCCCTCCAACGAACCCCCGAC | 6160 | SLQRTPD | 7827 | 108.937 |
| 1182 | GCAAACGACTCTGCCAAAACA | 6161 | ANDSAKT | 7828 | 108.9125 |
| 1183 | AAAAAAGTCGAACAAGAACCA | 6162 | KKVEQEP | 7829 | 108.907 |
| 1184 | GCAAGTCGGGACCTGGGACAA | 6163 | ASRDLGQ | 7830 | 108.906 |
| 1185 | TGGGAGAGTGATAAGTTTCGT | 6164 | WESDKFR | 7831 | 108.876 |
| 1186 | AACCGCGGAACAGAAGTTTAC | 6165 | NRGTEVY | 7832 | 108.8187 |
| 1187 | AATATTAGTAGTATTAATCAG | 6166 | NISSINQ | 7833 | 108.8155 |
| 1188 | GCCTCGAAAGGCTTCGGCCAC | 6167 | ASKGFGH | 7834 | 108.7886 |
| 1189 | CAGTCGCAGAATGTGACTCAG | 6168 | QSQNVTQ | 7835 | 108.7825 |
| 1190 | AACGGATACCAACTACAAATC | 6169 | NGYQLQI | 7836 | 108.779 |
| 1191 | TGTACTAATGCGTCGGATCTT | 6170 | CTNASDL | 7837 | 108.74 |
| 1192 | ACCGTCGCCTCGCCCAACACC | 6171 | TVASPNT | 7838 | 108.738 |
| 1193 | AATACTGCTCCGCCGAATCAT | 6172 | NTAPPNH | 7839 | 108.733 |
| 1194 | CTTTCTCAACAACGCGACTAC | 6173 | LSQQRDY | 7840 | 108.69245 |
| 1195 | TGGAATCAGAATGTGTCTCAT | 6174 | WNQNVSH | 7841 | 108.6785 |
| 1196 | ACAGGTAGTTCAGACAGATTA | 6175 | TGSSDRL | 7842 | 108.676 |
| 1197 | AACACAACGCCACCTAACCAC | 6176 | NTTPPNH | 7843 | 108.602 |
| 1198 | GTGGTCGACTCAACATACCCG | 6177 | VVDSTYP | 7844 | 108.592 |
| 1199 | ACGGATGCTACGGGGAGGCAT | 6178 | TDATGRH | 7845 | 108.5905 |
| 1200 | TTGTTTACTGCTGGGAGTACT | 6179 | LFTAGST | 7846 | 108.58 |
| 1201 | TTGCGTGATCAGACTAGTATG | 6180 | LRDQTSM | 7847 | 108.566 |
| 1202 | ATCGAAACGGACCGCCACCGG | 6181 | IETDRHR | 7848 | 108.531 |
| 1203 | AGTGGGCCTGAGAATACGTTG | 6182 | SGPENTL | 7849 | 108.526 |
| 1204 | GACAACCAAAACGCCGACAGG | 6183 | DNQNADR | 7850 | 108.486 |
| 1205 | CATGATGGTTATGTTCCTAAT | 6184 | HDGYVPN | 7851 | 108.469 |
| 1206 | CATATGTCTAGTTATTCGTCG | 6185 | HMSSYSS | 7852 | 108.436 |
| 1207 | AGTCGTCTGCAGACTCAGCAG | 6186 | SRLQTQQ | 7853 | 108.4358 |
| 1208 | TCATACACAGCAGGAAGACCC | 6187 | SYTAGRP | 7854 | 108.417 |
| 1209 | GTGCAGCAGAATAATATTAAT | 6188 | VQQNNIN | 7855 | 108.376 |
| 1210 | GATGCGAAGGCTCTTACGACT | 6189 | DAKALTT | 7856 | 108.368 |
| 1211 | AAGGATGAGCATCTTCATTAT | 6190 | KDEHLHY | 7857 | 108.358 |
| 1212 | CACGGTGACCGAACAGCTTTA | 6191 | HGDRTAL | 7858 | 108.327 |
| 1213 | AATTTTACTATTACGGAGGCG | 6192 | NFTITEA | 7859 | 108.32 |
| 1214 | GACACTCACATGAACAAACTG | 6193 | DTHMNKL | 7860 | 108.316 |
| 1215 | CAACCAGGAGCCCCCCAAACC | 6194 | QPGAPQT | 7861 | 108.312 |
| 1216 | GGGGAAGCACGCCGAGAAGCC | 6195 | GEARREA | 7862 | 108.302 |
| 1217 | AAGTCTCTTAGTAGTGATGAT | 6196 | KSLSSDD | 7863 | 108.2375 |
| 1218 | ATGAATACGACTTATAATGAG | 6197 | MNTTYNE | 7864 | 108.231 |
| 1219 | GCGGCCGCACTAGAAACAATA | 6198 | AAALETI | 7865 | 108.223 |
| 1220 | AACGTCGCTCCCTACAGTAGC | 6199 | NVAPYSS | 7866 | 108.21595 |
| 1221 | TCTGCGGGTATGGTGAGTCTG | 6200 | SAGMVSL | 7867 | 108.2145 |
| 1222 | TGCGACTTGTCACAATCATGC | 6201 | CDLSQSC | 7868 | 108.133 |
| 1223 | GTTTTGATTACGATGAGTTCG | 6202 | VLITMSS | 7869 | 108.118 |
| 1224 | CAAGTTGGGGCTCTAATGGTT | 6203 | QVGALMV | 7870 | 108.037 |
| 1225 | CAACGTACCTCGGAAGCGCCA | 6204 | QRTSEAP | 7871 | 108.0315 |
| 1226 | TTGGGTAATGGTAGTTCTTTG | 6205 | LGNGSSL | 7872 | 108.0135 |
| 1227 | CCTAGTGTCCGTTTGCCCTTA | 6206 | PSVRLPL | 7873 | 108.007 |
| 1228 | GATTCTGCTCCGAGTACTATT | 6207 | DSAPSTI | 7874 | 108.003 |
| 1229 | AATTATAATGGGGTTAATGTG | 6208 | NYNGVNV | 7875 | 107.956 |
| 1230 | TCGGCTCATCAGACGCCGACG | 6209 | SAHQTPT | 7876 | 107.932 |
| 1231 | GATCATAGTAAGCAGATTTCG | 6210 | DHSKQIS | 7877 | 107.923 |
| 1232 | GCCGCCAGCTTGTCGCAAAGC | 6211 | AASLSQS | 7878 | 107.914 |
| 1233 | CACGCCGACGTTGGCATGAGC | 6212 | HADVGMS | 7879 | 107.888 |
| 1234 | CACGTGACAGTAACGTTAAAC | 6213 | HVTVTLN | 7880 | 107.8865 |
| 1235 | AATTCTACGCATATTAATTCG | 6214 | NSTHINS | 7881 | 107.8843 |
| 1236 | CTGGGGCTTGCTGGTCAGGTT | 6215 | LGLAGQV | 7882 | 107.884 |
| 1237 | AGCAGTCAAGCCCACGGCCCA | 6216 | SSQAHGP | 7883 | 107.872 |
| 1238 | GCTTTTAAGTCGGGTAGTATT | 6217 | AFKSGSI | 7884 | 107.866 |
| 1239 | CACTCCCCATCCCACGACTCG | 6218 | HSPSHDS | 7885 | 107.844 |
| 1240 | CCAAACGGCGAAAGTTCGCGA | 6219 | PNGESSR | 7886 | 107.8303 |
| 1241 | ATTCTTACGCCTTTGGATAAG | 6220 | ILTPLDK | 7887 | 107.825 |
| 1242 | TCCGCCTCTTACTCCAGGATG | 6221 | SASYSRM | 7888 | 107.815 |
| 1243 | GAGGCGTTGCATGATCGGAAT | 6222 | EALHDRN | 7889 | 107.793 |
| 1244 | GGTGAACAACACAACGCCCCC | 6223 | GEQHNAP | 7890 | 107.778 |
| 1245 | GGGAATATGGTTACGCCTAAT | 6224 | GNMVTPN | 7891 | 107.753 |
| 1246 | AACGCTCTCCTCAACGCACCT | 6225 | NALLNAP | 7892 | 107.742 |
| 1247 | GCAAGTGACCTACAAATGACG | 6226 | ASDLQMT | 7893 | 107.723 |
| 1248 | TCGTATGATATGCATACGAAT | 6227 | SYDMHTN | 7894 | 107.705 |
| 1249 | AATATGTCGCATAGTACTCTG | 6228 | NMSHSTL | 7895 | 107.6777 |
| 1250 | ACTGCCAACAACCACTCTCCG | 6229 | TANNHSP | 7896 | 107.671 |
| 1251 | CAAGCCCCGCCAACAGCACAA | 6230 | QAPPTAQ | 7897 | 107.668 |
| 1252 | AACTACCACGGAGACAACGTT | 6231 | NYHGDNV | 7898 | 107.637 |
| 1253 | AGGGATAGTACTATTAGTCGG | 6232 | RDSTISR | 7899 | 107.635 |
| 1254 | GTTTCTTCGCCTAATGGTACG | 6233 | VSSPNGT | 7900 | 107.6095 |
| 1255 | TCCCGAATCACGGTGAACGCA | 6234 | SRITVNA | 7901 | 107.593 |
| 1256 | GTCGGAACAACCTCGAACGGC | 6235 | VGTTSNG | 7902 | 107.575 |
| 1257 | CATACGAATCAGATGCAGCCT | 6236 | HTNQMQP | 7903 | 107.5573 |
| 1258 | AAAAGCAACGCGGGATTCGGT | 6237 | KSNAGFG | 7904 | 107.5065 |
| 1259 | AAAGAAAGCCTCGAAGACGTC | 6238 | KESLEDV | 7905 | 107.49 |
| 1260 | GCGCAGGTTAATAATCATGAT | 6239 | AQVNNHD | 7906 | 107.489 |
| 1261 | AACGCTTCTACCTACATGGAC | 6240 | NASTYMD | 7907 | 107.479 |
| 1262 | ACGTCTGATACGAATGCTAGG | 6241 | TSDTNAR | 7908 | 107.4605 |
| 1263 | GAGAGTCGTATGCGTAGTATT | 6242 | ESRMRSI | 7909 | 107.451 |
| 1264 | CGTGTTGAAGACACCAACTCC | 6243 | RVEDTNS | 7910 | 107.416 |
| 1265 | GCCTCTAACCACCTACAAGCC | 6244 | ASNHLQA | 7911 | 107.3863 |
| 1266 | CGCTTACACGGCTCAGACTCG | 6245 | RLHGSDS | 7912 | 107.358 |
| 1267 | ACCGTCGAACAAATAAACTCG | 6246 | TVEQINS | 7913 | 107.349 |
| 1268 | AGGTCCGTACCATCACCACAC | 6247 | RSVPSPH | 7914 | 107.343 |
| 1269 | GAATACCTCGCCCTGGGACAC | 6248 | EYLALGH | 7915 | 107.336 |
| 1270 | AATACTAATAATCAGGAGCAG | 6249 | NTNNQEQ | 7916 | 107.332 |
| 1271 | AACTACGGTTCCGGACGAATC | 6250 | NYGSGRI | 7917 | 107.3205 |
| 1272 | CGCCACGGGGACACACCGATG | 6251 | RHGDTPM | 7918 | 107.303 |
| 1273 | AACGACACCATCGGCAGACCA | 6252 | NDTIGRP | 7919 | 107.2995 |
| 1274 | TATGGGGAGCGTGCTAGGACG | 6253 | YGERART | 7920 | 107.297 |
| 1275 | GTTCTTGGGATGCAGAGGTCT | 6254 | VLGMQRS | 7921 | 107.295 |
| 1276 | CTTCATTTTCATGCTTCGCAG | 6255 | LHFHASQ | 7922 | 107.281 |
| 1277 | ACCGACACGCTCAGCGAAAGA | 6256 | TDTLSER | 7923 | 107.247 |
| 1278 | GGGACAGGTACCGTTGGATGG | 6257 | GTGTVGW | 7924 | 107.203 |
| 1279 | ACAGAAAGCCCCAAACTACTA | 6258 | TESPKLL | 7925 | 107.2015 |
| 1280 | ACGATTAGGAGTGAGGGTTTT | 6259 | TIRSEGF | 7926 | 107.1495 |
| 1281 | GCGTCTAGTTATATTAATAAT | 6260 | ASSYINN | 7927 | 107.144 |
| 1282 | TTACACCTTGGGTTATCATCT | 6261 | LHLGLSS | 7928 | 107.1415 |
| 1283 | GTCACTGGCACTACCCCGGGA | 6262 | VTGTTPG | 7929 | 107.137 |
| 1284 | GTGACGTCGTCTGCTAGTGGT | 6263 | VTSSASG | 7930 | 107.0606 |
| 1285 | CAAATGCACCTACACATGCAA | 6264 | QMHLHMQ | 7931 | 107.057 |
| 1286 | GGTACCATGAGTCTATTAATG | 6265 | GTMSLLM | 7932 | 107.046 |
| 1287 | TGCGCATCAGAAGTTTGCCAA | 6266 | CASEVCQ | 7933 | 107.035 |
| 1288 | AATCTTGTGATGAGTGGGACG | 6267 | NLVMSGT | 7934 | 107.0225 |
| 1289 | CAATCACTCAAAGACGGCACT | 6268 | QSLKDGT | 7935 | 106.991 |
| 1290 | GCGTTGAATGGTTCTGGTATT | 6269 | ALNGSGI | 7936 | 106.976 |
| 1291 | AGACACGTCGTCCCCGACTCC | 6270 | RHVVPDS | 7937 | 106.9705 |
| 1292 | CTGTATCATGATTCGCATCTT | 6271 | LYHDSHL | 7938 | 106.963 |
| 1293 | GGGAGTACGCCTATTACTTCT | 6272 | GSTPITS | 7939 | 106.957 |
| 1294 | CCCAACGACCAAATCAGCGGA | 6273 | PNDQISG | 7940 | 106.936 |
| 1295 | AGTGGAAAACAAGACAAATAC | 6274 | SGKQDKY | 7941 | 106.925 |
| 1296 | AGTGGGCATGCTTCTCAGGGT | 6275 | SGHASQG | 7942 | 106.8675 |
| 1297 | AAGATGGGGAGTATTGAGGTT | 6276 | KMGSLEV | 7943 | 106.864 |
| 1298 | TCAACTTTAGACCGAAGCGAA | 6277 | STLDRSE | 7944 | 106.8615 |
| 1299 | ACGGAGCTTAGTGAGTATACT | 6278 | TELSEYT | 7945 | 106.852 |
| 1300 | GCCAACGGAGGAGGATACCCC | 6279 | ANGGGYP | 7946 | 106.847 |
| 1301 | GTAACCGAATCTAACTCTCTA | 6280 | VTESNSL | 7947 | 106.83 |
| 1302 | CCAGTCTACGACCGCGACGTC | 6281 | PVYDRDV | 7948 | 106.812 |
| 1303 | GATAATAATAAGCATGGTACT | 6282 | DNNKHGT | 7949 | 106.806 |
| 1304 | ATCTACGAAACCGTAACCTTG | 6283 | IYETVTL | 7950 | 106.801 |
| 1305 | ACTCAGACTGGTCATGTTTCT | 6284 | TQTGHVS | 7951 | 106.7868 |
| 1306 | CAAGCCGACCTCAGGTACAAA | 6285 | QADLRYK | 7952 | 106.773 |
| 1307 | TGTAAGACGAATAATGCTGGT | 6286 | CKTNNAG | 7953 | 106.749 |
| 1308 | GCCGGTCACCAACAACTGGCC | 6287 | AGHQQLA | 7954 | 106.7459 |
| 1309 | GATAGGGATATGGAGGGTGTT | 6288 | DRDMEGV | 7955 | 106.742 |
| 1310 | GATCAGCCGGGGTATGTGCGT | 6289 | DQPGYVR | 7956 | 106.7387 |
| 1311 | GATGCTATGCTTGCTCATCCG | 6290 | DAMLAHP | 7957 | 106.735 |
| 1312 | GCCCTTAACCTGTACTCCAGC | 6291 | ALNLYSS | 7958 | 106.732 |
| 1313 | CTACTATCTAAAGGGGACTCC | 6292 | LLSKGDS | 7959 | 106.709 |
| 1314 | TCGAGTATTAGTCTGCGGTAT | 6293 | SSISLRY | 7960 | 106.645 |
| 1315 | GGGTCGAGCCAACACCACGAA | 6294 | GSSQHHE | 7961 | 106.62 |
| 1316 | TCGATTGGGTATTCGCCTCCG | 6295 | SIGYSPP | 7962 | 106.5773 |
| 1317 | CACTCCAACGCGACTACGATA | 6296 | HSNATTI | 7963 | 106.567 |
| 1318 | TCGGCACACGACGCAAGACTA | 6297 | SAHDARL | 7964 | 106.5665 |
| 1319 | GTTCACACCGCAGACACAATA | 6298 | VHTADTI | 7965 | 106.564 |
| 1320 | CGAGACGGCTCTACTAAAGTT | 6299 | RDGSTKV | 7966 | 106.55855 |
| 1321 | TTGCAGGAGTCTCTTCCTGGT | 6300 | LQESLPG | 7967 | 106.542 |
| 1322 | TTAGACTACACCCCTCAAAAC | 6301 | LDYTPQN | 7968 | 106.519 |
| 1323 | GGACCAAGTTCGCACATCGTT | 6302 | GPSSHIV | 7969 | 106.507 |
| 1324 | AGCGCCGACACCCGGTCCCCC | 6303 | SADTRSP | 7970 | 106.466 |
| 1325 | ATGATGAAGAGTGAGGAGAAT | 6304 | MMKSEEN | 7971 | 106.425 |
| 1326 | GGTATGACGAGTGAGTTGACG | 6305 | GMTSELT | 7972 | 106.417 |
| 1327 | GTAGACACCTACAGCGGTCTG | 6306 | VDTYSGL | 7973 | 106.415 |
| 1328 | GGGATGAGGGATACGCCGCCG | 6307 | GMRDTPP | 7974 | 106.385 |
| 1329 | GAGCATGATGTGAGTACGCGT | 6308 | EHDVSTR | 7975 | 106.302 |
| 1330 | GAGGTGGTGAAGACTACTCAT | 6309 | EVVKTTH | 7976 | 106.269 |
| 1331 | GTTTACGACAACGTTTCTTCT | 6310 | VYDNVSS | 7977 | 106.268 |
| 1332 | CTCATGAAAGACATGGAATCC | 6311 | LMKDMES | 7978 | 106.2609 |
| 1333 | CCTCTTCATGTTGCTTCTCCT | 6312 | PLHVASP | 7979 | 106.239 |
| 1334 | GAAGTACGCGACCAAAAAACA | 6313 | EVRDQKT | 7980 | 106.2075 |
| 1335 | CCAACTCCCTACTACACCGCC | 6314 | PTPYYTA | 7981 | 106.124 |
| 1336 | AACAACTACGCCTACTCCGCT | 6315 | NNYAYSA | 7982 | 106.1085 |
| 1337 | CTTGTTGATACGGATAGGAAT | 6316 | LVDTDRN | 7983 | 106.108 |
| 1338 | TATCCGGCTGATCATCGGACT | 6317 | YPADHRT | 7984 | 106.088 |
| 1339 | TCTGCAACAACGAACCACGGA | 6318 | SATTNHG | 7985 | 106.066 |
| 1340 | CGTGATGATCAGCAGCTTGAT | 6319 | RDDQQLD | 7986 | 106.064 |
| 1341 | GGAGCGGGACAATCTCACGTG | 6320 | GAGQSHV | 7987 | 106.0351 |
| 1342 | GATAGGACTTATCATGAGGTG | 6321 | DRTYHEV | 7988 | 105.996 |
| 1343 | GATGGTAATAATACGACTTAT | 6322 | DGNNTTY | 7989 | 105.99 |
| 1344 | GTGCATATGGAGTCGTATGCG | 6323 | VHMESYA | 7990 | 105.983 |
| 1345 | TGGTACGAAACAATCAGCCCG | 6324 | WYETISP | 7991 | 105.959 |
| 1346 | CTGTTGGGGGCTCATCAGCCG | 6325 | LLGAHQP | 7992 | 105.9002 |
| 1347 | CACGTACCTAACACTGAAGCA | 6326 | HVPNTEA | 7993 | 105.893 |
| 1348 | AATTCTCAGAATCCTCAGGGT | 6327 | NSQNPQG | 7994 | 105.8895 |
| 1349 | CTACAAGACCGGGCAACGAAC | 6328 | LQDRATN | 7995 | 105.864 |
| 1350 | ATTGTGAATCAGCATTCGGAG | 6329 | IVNQHSE | 7996 | 105.832 |
| 1351 | TTTGAGCAGGGTAAGGTTGAG | 6330 | FEQGKVE | 7997 | 105.811 |
| 1352 | GTGGCGACGGGTGTGTTTGCT | 6331 | VATGVFA | 7998 | 105.808 |
| 1353 | GACAAAATACAAAACGAAACA | 6332 | DKIQNET | 7999 | 105.784 |
| 1354 | ACGGACAACCCGTCCTACAAA | 6333 | TDNPSYK | 8000 | 105.771 |
| 1355 | GGCGTGAACACAAAAATCGAA | 6334 | GVNTKIE | 8001 | 105.7665 |
| 1356 | GGCTCTCACAACGGCCCAGCC | 6335 | GSHNGPA | 8002 | 105.763 |
| 1357 | TCCAACATGGGCGTAGCCTCT | 6336 | SNMGVAS | 8003 | 105.76 |
| 1358 | AACACGGACACTAACGAAAAA | 6337 | NTDTNEK | 8004 | 105.759 |
| 1359 | TCTGCGCTTTTGCGGATGGAT | 6338 | SALLRMD | 8005 | 105.707 |
| 1360 | CCTCAACTAAGCGGCACAGCG | 6339 | PQLSGTA | 8006 | 105.6914 |
| 1361 | TCTATTGTTAATAATGGGGCT | 6340 | SIVNNGA | 8007 | 105.684 |
| 1362 | AGCCTAGACCACGCCCCTCTA | 6341 | SLDHAPL | 8008 | 105.661 |
| 1363 | GACCACTCGAAACAAAACTCT | 6342 | DHSKQNS | 8009 | 105.653 |
| 1364 | CACAGTGACATGGTCAGCGGC | 6343 | HSDMVSG | 8010 | 105.642 |
| 1365 | CAGCATCGTGCGCAGGATGTG | 6344 | QHRAQDV | 8011 | 105.5608 |
| 1366 | GGTAGTACTAAGTCTGGGCAG | 6345 | GSTKSGQ | 8012 | 105.5509 |
| 1367 | ACAATGAGCGTAACTCTGGAA | 6346 | TMSVTLE | 8013 | 105.526 |
| 1368 | TATAATAATGGTGGGCATGTT | 6347 | YNNGGHV | 8014 | 105.516 |
| 1369 | GGTACTGCTGAGAATACGAGT | 6348 | GTAENTS | 8015 | 105.494 |
| 1370 | AATAGTTATGATGCGACGAGG | 6349 | NSYDATR | 8016 | 105.488 |
| 1371 | AGCGTCAACAACATGCGACTC | 6350 | SVNNMRL | 8017 | 105.4477 |
| 1372 | CTTAACTTACAATACACTCTG | 6351 | LNLQYTL | 8018 | 105.443 |
| 1373 | GAGGCGCAGACCGGCTGGGTT | 6352 | EAQTGWV | 8019 | 105.443 |
| 1374 | CCCGCTGAAGGAAACAACCGT | 6353 | PAEGNNR | 8020 | 105.442 |
| 1375 | TCTCTGGGTGGGAATCCGCCT | 6354 | SLGGNPP | 8021 | 105.4335 |
| 1376 | TATAATAGGGATAATGGTTCT | 6355 | YNRDNGS | 8022 | 105.4285 |
| 1377 | TTGACTGATCCTAAGGGGCAG | 6356 | LTDPKGQ | 8023 | 105.404 |
| 1378 | ACCCCAACAGGCACCAACAAA | 6357 | TPTGTNK | 8024 | 105.403 |
| 1379 | GTTCACGCTAACGCTACATTA | 6358 | VHANATL | 8025 | 105.38 |
| 1380 | CGCGAAATAGTGCACTCAAAC | 6359 | REIVHSN | 8026 | 105.376 |
| 1381 | TACGCCGTCGCGATAGGCACA | 6360 | YAVAIGT | 8027 | 105.366 |
| 1382 | AACACAACACCTCCCGACCAC | 6361 | NTTPPDH | 8028 | 105.348 |
| 1383 | GTTATTCAGTCTGATAATACG | 6362 | VIQSDNT | 8029 | 105.32 |
| 1384 | GTTCCGGCGCATTCTCGGGGT | 6363 | VPAHSRG | 8030 | 105.305 |
| 1385 | CAAAACAGTGACCTCGCCAGC | 6364 | QNSDLAS | 8031 | 105.296 |
| 1386 | CGCATCGTAGACACGTTGGGA | 6365 | RIVDTLG | 8032 | 105.2825 |
| 1387 | CACACTTACTCACAAGCAGAC | 6366 | HTYSQAD | 8033 | 105.267 |
| 1388 | ACGGCTCCATCCGTAGGGTCT | 6367 | TAPSVGS | 8034 | 105.259 |
| 1389 | AACGTGGGCACCGACAGAGAC | 6368 | NVGTDRD | 8035 | 105.231 |
| 1390 | GGGATTAATCGTACTAGTGAG | 6369 | GINRTSE | 8036 | 105.2145 |
| 1391 | GTAGAAACAGACAGCTTAATA | 6370 | VETDSLI | 8037 | 105.195 |
| 1392 | CACTCCGCAGCGGGTGACGGT | 6371 | HSAAGDG | 8038 | 105.195 |
| 1393 | GATGCTGGGATTAGTTCTTAT | 6372 | DAGISSY | 8039 | 105.102 |
| 1394 | TGCACCGCCACAAAATGCTCA | 6373 | CTATKCS | 8040 | 105.0959 |
| 1395 | CGCATAGACACTCTCCTAGTC | 6374 | RIDTLLV | 8041 | 105.089 |
| 1396 | GTATCACAATCACACGACGTG | 6375 | VSQSHDV | 8042 | 105.087 |
| 1397 | GCACTACCATCCCACTCCTCC | 6376 | ALPSHSS | 8043 | 105.059 |
| 1398 | GGGAAACCTGCGGAAGCGCCG | 6377 | GKPAEAP | 8044 | 105.055 |
| 1399 | TGGAATAGTCCGGGTGAGGCG | 6378 | WNSPGEA | 8045 | 105.053 |
| 1400 | AGGCTGGAGCGTCCGGATTAT | 6379 | RLERPDY | 8046 | 105.04 |
| 1401 | ACGCGGGAGAGTCTGGTGGAT | 6380 | TRESLVD | 8047 | 105.022 |
| 1402 | AGACACGAAGGTCCGTACTCC | 6381 | RHEGPYS | 8048 | 105.002 |
| 1403 | GTTTTGTCTGATAAGGCGTTT | 6382 | VLSDKAF | 8049 | 104.981 |
| 1404 | ACTAGTGCGACTGATTCGATG | 6383 | TSATDSM | 8050 | 104.908 |
| 1405 | ACTGAGCCGCTTCCGATGTCT | 6384 | TEPLPMS | 8051 | 104.869 |
| 1406 | ATGCCTTACGTCGGGACAGTA | 6385 | MFYVGTV | 8052 | 104.838 |
| 1407 | CGTGATTATTCTCCTACTGAT | 6386 | RDYSPTD | 8053 | 104.836 |
| 1408 | CGGAATGGTGGTACTACGGAT | 6387 | RNGGTTD | 8054 | 104.7625 |
| 1409 | ATGATGGGCGCGACAACGAAA | 6388 | MMGATTK | 8055 | 104.7503 |
| 1410 | GCTGCCGTTGGCGGAGACACC | 6389 | AAVGGDT | 8056 | 104.742 |
| 1411 | CTTGTGAATAATGATGGGACT | 6390 | LVNNDGT | 8057 | 104.7255 |
| 1412 | AGTTCGACTCCGCAGGATACT | 6391 | SSTPQDT | 8058 | 104.713 |
| 1413 | AGTCTGCGGATGGAGAATAGT | 6392 | SLRMENS | 8059 | 104.7025 |
| 1414 | GTGCAGGGGCAGACCGGCTGG | 6393 | VQGQTGW | 8060 | 104.688 |
| 1415 | CTAGGTTTCACACCCCAACCG | 6394 | LGFTPQP | 8061 | 104.677 |
| 1416 | TCGGTTGCTAAGGATCAGACG | 6395 | SVAKDQT | 8062 | 104.675 |
| 1417 | CCGCGGCATGAGTTGAGTAAT | 6396 | PRHELSN | 8063 | 104.645 |
| 1418 | AAAATGGGATCGAACCCCGCA | 6397 | KMGSNPA | 8064 | 104.6241 |
| 1419 | GAGGCGACTCATGGTTCTTAT | 6398 | EATHGSY | 8065 | 104.613 |
| 1420 | CCTGAGGTTGCGTGTCCTGGG | 6399 | PEVACPG | 8066 | 104.595 |
| 1421 | GTGAATACGCGGGAGGTTACG | 6400 | VNTREVT | 8067 | 104.583 |
| 1422 | ACGGCTCGTGCGATTGATATG | 6401 | TARAIDM | 8068 | 104.551 |
| 1423 | ACCGACGGCGCCCTGGGTTAC | 6402 | TDGALGY | 8069 | 104.5325 |
| 1424 | GGGTCGCAATACGCGAACCGC | 6403 | GSQYANR | 8070 | 104.524 |
| 1425 | GAAATGGGTAACCAATACCCA | 6404 | EMGNQYP | 8071 | 104.453 |
| 1426 | CCGTCGACACTCGCTGAAACA | 6405 | PSTLAET | 8072 | 104.449 |
| 1427 | CGCATAGGCGTTGGAGCACCA | 6406 | RIGVGAP | 8073 | 104.4405 |
| 1428 | CTGAGTGTGAAGGAGGAGATT | 6407 | LSVKEEI | 8074 | 104.435 |
| 1429 | TATACTACTCATGAGAGTGGG | 6408 | YTTHESG | 8075 | 104.433 |
| 1430 | CTTACTGCTGTTCTGACTGTT | 6409 | LTAVLTV | 8076 | 104.424 |
| 1431 | CTGCAGACTTCTGTTGCTACT | 6410 | LQTSVAT | 8077 | 104.42 |
| 1432 | ACTGTGCGTTCGCCTCAGCCG | 6411 | TVRSPQP | 8078 | 104.391 |
| 1433 | CATCCTGATGGTACTCGGCCG | 6412 | HPDGTRP | 8079 | 104.375 |
| 1434 | GGAGTAACAATCGGTAGCAGG | 6413 | GVTIGSR | 8080 | 104.3732 |
| 1435 | ACATACGCCTCTACTGAAGCG | 6414 | TYASTEA | 8081 | 104.3675 |
| 1436 | AGGAGTAGTCCTGCGACGAAT | 6415 | RSSPATN | 8082 | 104.355 |
| 1437 | ATCGGGTCGCCGTTGGCCAAC | 6416 | IGSPLAN | 8083 | 104.35 |
| 1438 | GCGTCGACTGAGTCTCATGTG | 6417 | ASTESHV | 8084 | 104.344 |
| 1439 | ATTGCGCAGAATGAGACGTAT | 6418 | IAQNETY | 8085 | 104.336 |
| 1440 | ATGGAGTCTAAGCCGTGGCAG | 6419 | MESKPWQ | 8086 | 104.307 |
| 1441 | TTAGAAAACCCAACACCAGCA | 6420 | LENPTPA | 8087 | 104.305 |
| 1442 | CCCAACCCCAGTCCAAGACAA | 6421 | PNPSPRQ | 8088 | 104.258 |
| 1443 | TCGACTAGTAATCCGCCTTAT | 6422 | STSNPPY | 8089 | 104.242 |
| 1444 | TATTTGACGGATACTCCTACT | 6423 | YLTDTPT | 8090 | 104.241 |
| 1445 | ATACGTGCATTGATGACGGAC | 6424 | IRALMTD | 8091 | 104.237 |
| 1446 | CCTATGGGTACGGATACGGTT | 6425 | PMGTDTV | 8092 | 104.221 |
| 1447 | ACGAGGACTCAGGGGACGTCT | 6426 | TRTQGTS | 8093 | 104.19625 |
| 1448 | TCTAATAATATGAATCAGGCG | 6427 | SNNMNQA | 8094 | 104.187 |
| 1449 | GAAGACTCTGTAAACCACATC | 6428 | EDSVNHI | 8095 | 104.185 |
| 1450 | TCTGTTGTGCCTACGGATAAG | 6429 | SVVPTDK | 8096 | 104.174 |
| 1451 | GTGCGCGGCGTTCAAGACGCC | 6430 | VRGVQDA | 8097 | 104.167 |
| 1452 | CATGATGTGACTGTGCGGAAT | 6431 | HDVTVRN | 8098 | 104.164 |
| 1453 | CATAATAATCATGCGGGTGAG | 6432 | HNNHAGE | 8099 | 104.153 |
| 1454 | GGTAATATGAATCATAGTATT | 6433 | GNMNHSI | 8100 | 104.15 |
| 1455 | GGTGTGCATACTCATACTGTT | 6434 | GVHTHTV | 8101 | 104.139 |
| 1456 | TTTTTGCCGCAGCTGGGGCAG | 6435 | FLPQLGQ | 8102 | 104.094 |
| 1457 | TTGGCCAACATGTCCGCACCA | 6436 | LANMSAP | 8103 | 104.093 |
| 1458 | GTTCGCAGAGACGAAACACCT | 6437 | VRRDETP | 8104 | 104.0585 |
| 1459 | TGCCGCGACAACGTCTTAGCT | 6438 | CRDNVLA | 8105 | 104.046 |
| 1460 | ATGTTGGCTTCTCGGGTGCCT | 6439 | MLASRVP | 8106 | 104.0205 |
| 1461 | GTCAGAACAGTCCTTCAACAA | 6440 | VRTVLQQ | 8107 | 104.017 |
| 1462 | TCGAATCAGAATGTGGATTGG | 6441 | SNQNVDW | 8108 | 104 |
| 1463 | ACTGAGGTTACGGGGGATAGT | 6442 | TEVTGDS | 8109 | 103.965 |
| 1464 | GAAAGTGCCACATCTCTAAAA | 6443 | ESATSLK | 8110 | 103.9355 |
| 1465 | AACCACCCCGCACCAAGCTCA | 6444 | NHPAPSS | 8111 | 103.9235 |
| 1466 | TACGGTAACGCGAACACCGTA | 6445 | YGNANTV | 8112 | 103.92115 |
| 1467 | CAAAACGACAAATCTGACAAC | 6446 | QNDKSDN | 8113 | 103.9165 |
| 1468 | AGTCAGGCTCAGATTCGTGTT | 6447 | SQAQIRV | 8114 | 103.915 |
| 1469 | TTTCAGCGTGATGTTGGTCAT | 6448 | FQRDVGH | 8115 | 103.8651 |
| 1470 | CTGATGAATCGTAATGCTCCT | 6449 | LMNRNAP | 8116 | 103.8648 |
| 1471 | GCGGGCAGTTCGCCATCACGC | 6450 | AGSSPSR | 8117 | 103.8635 |
| 1472 | TTATTCCACAGCCAAATGACC | 6451 | LFHSQMT | 8118 | 103.849 |
| 1473 | ATGATGTCTAACAGCCTCGCG | 6452 | MMSNSLA | 8119 | 103.8275 |
| 1474 | GTTACCACCGTCCTCCAATCA | 6453 | VTTVLQS | 8120 | 103.818 |
| 1475 | GGTAGTCAGCGTGCTATGAAT | 6454 | GSQRAMN | 8121 | 103.8086 |
| 1476 | GCATCCGGCGCACGCTACGTC | 6455 | ASGARYV | 8122 | 103.7981 |
| 1477 | AAAAACTACGACAGTGACTCA | 6456 | KNYDSDS | 8123 | 103.794 |
| 1478 | GTGGGTTCTGGGGTTGGGGTT | 6457 | VGSGVGV | 8124 | 103.793 |
| 1479 | CGTTCTGACCTTACTGAAAGT | 6458 | RSDLTES | 8125 | 103.736 |
| 1480 | AGGGCGGAGTTTATTGATACG | 6459 | RAEFIDT | 8126 | 103.735 |
| 1481 | ACATCTGAAATGCGGACAGCC | 6460 | TSEMRTA | 8127 | 103.725 |
| 1482 | GAGTTGGATCATCTTTCGCAT | 6461 | ELDHLSH | 8128 | 103.714 |
| 1483 | ACACAAGCAGGTCTTGCGTCA | 6462 | TQAGLAS | 8129 | 103.696 |
| 1484 | GCGGCTCAGCATCATGATACG | 6463 | AQIIHDT | 8130 | 103.693 |
| 1485 | GGCGGCGCACACACTCGTGTA | 6464 | GGAHTRV | 8131 | 103.676 |
| 1486 | GCCTACGGTATACACGAAGTG | 6465 | AYGIHEV | 8132 | 103.653 |
| 1487 | GCGATGCTGCGTATGGAGCAG | 6466 | AMLRMEQ | 8133 | 103.652 |
| 1488 | ACGGATCGTTCGCGGCTGGGG | 6467 | TDRSRLG | 8134 | 103.622 |
| 1489 | GAGAGGGAGCCTCCTAAGAAT | 6468 | EREPPKN | 8135 | 103.621 |
| 1490 | GTTGTTAAGGAGATTAAGCTG | 6469 | VVKEIKL | 8136 | 103.6125 |
| 1491 | CACACCGGCCAAACACCATCA | 6470 | HTGQTPS | 8137 | 103.5945 |
| 1492 | GTGTCTCTGAGTTCGCCTCCG | 6471 | VSLSSPP | 8138 | 103.563 |
| 1493 | GGGGCAGGAAACCTGGGTACC | 6472 | GAGNLGT | 8139 | 103.5615 |
| 1494 | GCACGAGACGACACGATACAA | 6473 | ARDDTIQ | 8140 | 103.523 |
| 1495 | GGGACTTATACTAATATGCCG | 6474 | GTYTNMP | 8141 | 103.522 |
| 1496 | ATGCTGGGGGGTTTTGCGCAG | 6475 | MLGGFAQ | 8142 | 103.5051 |
| 1497 | CCATCCGAAATGAGGGCCGTA | 6476 | PSEMRAV | 8143 | 103.503 |
| 1498 | CGTATAAGCCCAGAAAACTCA | 6477 | RISPENS | 8144 | 103.497 |
| 1499 | AAGATGGGTGGTTCTCAGAGT | 6478 | KMGGSQS | 8145 | 103.477 |
| 1500 | GGTTTGATGGCGCATGTGACT | 6479 | GLMAHVT | 8146 | 103.464 |
| 1501 | TCACGTCAAACAGCGCTAACA | 6480 | SRQTALT | 8147 | 103.4599 |
| 1502 | AGTGATCTGAATCTTCCGCCG | 6481 | SDLNLPP | 8148 | 103.455 |
| 1503 | TATGTGTCTGATTATTTGCAT | 6482 | YVSDYLH | 8149 | 103.393 |
| 1504 | ACTAATGATAATAGTGATCGT | 6483 | TNDNSDR | 8150 | 103.374 |
| 1505 | TACTTAATGCACGACAGCGCA | 6484 | YLMHDSA | 8151 | 103.369 |
| 1506 | GGCTCTCGGAACGGACCCACA | 6485 | GSRNGPT | 8152 | 103.3096 |
| 1507 | AAAAACGGTGTTATAAACGAC | 6486 | KNGVIND | 8153 | 103.292 |
| 1508 | GAGTCTGTTGCTAATCTTAAG | 6487 | ESVANLK | 8154 | 103.162 |
| 1509 | GCATCGGACTCGACGACACCA | 6488 | ASDSTTP | 8155 | 103.149 |
| 1510 | CTGAACGTTAGTTCATCCAAA | 6489 | LNVSSSK | 8156 | 103.149 |
| 1511 | GAGGCTAAGGGTTTTGGTCAT | 6490 | EAKGFGH | 8157 | 103.1228 |
| 1512 | GGTACGAGTGCGGAGAGTCGG | 6491 | GTSAESR | 8158 | 103.111 |
| 1513 | ATGCACAACCTACCCTCATAC | 6492 | MHNLPSY | 8159 | 103.10145 |
| 1514 | GTCTTCACAGAAATAGAATCG | 6493 | VFTEIES | 8160 | 103.101 |
| 1515 | ACTCAAACTTCTACCTGGACC | 6494 | TQTSTWT | 8161 | 103.094 |
| 1516 | CCTATGAATAAGGATATTTTG | 6495 | PMNKDIL | 8162 | 103.07 |
| 1517 | AAAGAATCTGAATACAGAGTT | 6496 | KESEYRV | 8163 | 103.07 |
| 1518 | TCGACGAATTCTGAGGCGGTT | 6497 | STNSEAV | 8164 | 103.068 |
| 1519 | GATACGGCGAATCGTTCGACT | 6498 | DTANRST | 8165 | 103.03715 |
| 1520 | CCTAAGGCTCCGCTTAATAAT | 6499 | PKAPLNN | 8166 | 103.032 |
| 1521 | TTAGCTACATACCCCTCCCAC | 6500 | LATYPSH | 8167 | 103.028 |
| 1522 | GCTACGGTTCAGTCGGTTGAT | 6501 | ATVQSVD | 8168 | 103.011 |
| 1523 | AATTCGATGGGTAATGGGGGT | 6502 | NSMGNGG | 8169 | 103.009 |
| 1524 | GATCATAGTGAGCAGAATTCG | 6503 | DHSEQNS | 8170 | 102.995 |
| 1525 | ACTTTTTTGCCTCAGCTTGGG | 6504 | TFLPQLG | 8171 | 102.994 |
| 1526 | GGGTTTACTAATACGAGTAAG | 6505 | GFTNTSK | 8172 | 102.9895 |
| 1527 | ACGATGAATTATAGTCATACT | 6506 | TMNYSHT | 8173 | 102.962 |
| 1528 | AGTATCGGATTCTCAGTAGGC | 6507 | SIGFSVG | 8174 | 102.9565 |
| 1529 | AGTGAGAATCGGGCTGGTAAT | 6508 | SENRAGN | 8175 | 102.945 |
| 1530 | AGTCTTAATCTGCATAGTGTG | 6509 | SLNLHSV | 8176 | 102.93 |
| 1531 | CATGAGAGTCATTATGTTAGT | 6510 | HESHYVS | 8177 | 102.921 |
| 1532 | AATGTTGTTAATGGGATGGAT | 6511 | NVVNGMD | 8178 | 102.908 |
| 1533 | CACTCCGACAAAGTCTCCTCA | 6512 | HSDKVSS | 8179 | 102.8992 |
| 1534 | AAATCTGTAGGCGACGGGAGA | 6513 | KSVGDGR | 8180 | 102.8979 |
| 1535 | AGGCAGGTTGAGCAGTCTGAT | 6514 | RQVEQSD | 8181 | 102.889 |
| 1536 | AGGGAGCTGGTGAATACGGAT | 6515 | RELVNTD | 8182 | 102.87 |
| 1537 | AACTACAGGGACATCACAATG | 6516 | NYRDITM | 8183 | 102.8605 |
| 1538 | GCCAGCCTTGACCGCCTTCCA | 6517 | ASLDRLP | 8184 | 102.857 |
| 1539 | AGACAACTTGCTTCTCTCCCA | 6518 | RQLASLP | 8185 | 102.846 |
| 1540 | GTCAGCAAAACCAAAGACTCG | 6519 | VSKTKDS | 8186 | 102.832 |
| 1541 | AACGTATACGAAGGGCACCGC | 6520 | NVYEGHR | 8187 | 102.815 |
| 1542 | CTAGAACAACTACGGGTCCCA | 6521 | LEQLRVP | 8188 | 102.815 |
| 1543 | ATGACCTACACATCCCCAACC | 6522 | MTYTSPT | 8189 | 102.807 |
| 1544 | AACTCCCACACCGACAGAGGA | 6523 | NSHTDRG | 8190 | 102.801 |
| 1545 | GTGGCTGGGGGGACTTCGGAG | 6524 | VAGGTSE | 8191 | 102.789 |
| 1546 | GTCGACGCACACAGGGCTAAC | 6525 | VDAHRAN | 8192 | 102.77 |
| 1547 | CGGGCAGACATGACTCCCTTA | 6526 | RADMTPL | 8193 | 102.77 |
| 1548 | GGACACGAACAAACTGACGCA | 6527 | GHEQTDA | 8194 | 102.764 |
| 1549 | TACATCGCGGGAGGCGACCAA | 6528 | YIAGGDQ | 8195 | 102.75 |
| 1550 | TACGGCGACCTAACTACAGTC | 6529 | YGDLTTV | 8196 | 102.737 |
| 1551 | AGATTAGACCTGCAAGAACAC | 6530 | RLDLQEH | 8197 | 102.719 |
| 1552 | CACCTTAACCCGGCGGCCCAA | 6531 | HLNPAAQ | 8198 | 102.719 |
| 1553 | GGGGTTAACGAACAAACAAAC | 6532 | GVNEQTN | 8199 | 102.703 |
| 1554 | CGTCGGTTGAGTACGGATCTT | 6533 | RRLSTDL | 8200 | 102.702 |
| 1555 | GGATCCACAGGCCTACCCCCG | 6534 | GSTGLPP | 8201 | 102.7015 |
| 1556 | GACGACATGGTCAAAAACTCA | 6535 | DDMVKNS | 8202 | 102.6815 |
| 1557 | GTTATAGACCTAGTCACTCGC | 6536 | VIDLVTR | 8203 | 102.673 |
| 1558 | GGAGGCCTTACCAACGGTCTA | 6537 | GGLTNGL | 8204 | 102.67 |
| 1559 | CGTATGGAGGAGACTGCTTAT | 6538 | RMEETAY | 8205 | 102.6535 |
| 1560 | ACCGACATCTCCGGTTACGGA | 6539 | TDISGYG | 8206 | 102.642 |
| 1561 | CAGGTTAATCATAATACTAGT | 6540 | QVNHNTS | 8207 | 102.637 |
| 1562 | GCGACTACTGAGGATGTTCGT | 6541 | ATTEDVR | 8208 | 102.626 |
| 1563 | TGGAGCATCAAAAACCAAACA | 6542 | WSIKNQT | 8209 | 102.586 |
| 1564 | TCCCCTACCAGCAACACAATA | 6543 | SPTSNTI | 8210 | 102.584 |
| 1565 | ATGAAAAACTCTGGATTCGAC | 6544 | MKNSGFD | 8211 | 102.583 |
| 1566 | CTTGTTGCTGAGCGTTTGCCG | 6545 | LVAERLP | 8212 | 102.552 |
| 1567 | GGTGAAACTAACTTCCCAACT | 6546 | GETNFPT | 8213 | 102.532 |
| 1568 | AATGGTAAGCTGGGTACGACT | 6547 | NGKLGTT | 8214 | 102.52735 |
| 1569 | AACTTAGTAGCGTACACGAAA | 6548 | NLVAYTK | 8215 | 102.5245 |
| 1570 | TGGCAGCTTACGACGAGTCAT | 6549 | WQLTTSH | 8216 | 102.497 |
| 1571 | AGTTTGGACCTAGGAGGCAAC | 6550 | SLDLGGN | 8217 | 102.491 |
| 1572 | AACGAAAGCACCAAAGAATCT | 6551 | NESTKES | 8218 | 102.483 |
| 1573 | GGTTTTGATGGTAAGCAGCTT | 6552 | GFDGKQL | 8219 | 102.462 |
| 1574 | CATCTGTATATTTCGGCGGAT | 6553 | HLYISAD | 8220 | 102.442 |
| 1575 | TTACTTCCAAACAACACCCAC | 6554 | LLPNNTH | 8221 | 102.424 |
| 1576 | TCCGGAATGGCCGGCCTTTCC | 6555 | SGMAGLS | 8222 | 102.423 |
| 1577 | ATCACCTCACTCCCCGAAACC | 6556 | ITSLPET | 8223 | 102.414 |
| 1578 | GAGCTTAAGGAGAGTCAGAAG | 6557 | ELKESQK | 8224 | 102.408 |
| 1579 | AATATTGTGCAGGATTATCCG | 6558 | NIVQDYP | 8225 | 102.404 |
| 1580 | TCAGAAAACACCTCTGTACCC | 6559 | SENTSVP | 8226 | 102.388 |
| 1581 | GACCCCAACCAACCCAAAACA | 6560 | DPNQPKT | 8227 | 102.376 |
| 1582 | GCGGGTTTGGATGTGAATACG | 6561 | AGLDVNT | 8228 | 102.372 |
| 1583 | TCTCATGAGATGAATAATGGT | 6562 | SHEMNNG | 8229 | 102.366 |
| 1584 | TCTTACGCCATAAACCAATCA | 6563 | SYAINQS | 8230 | 102.335 |
| 1585 | GGTCATCTGCCTGCGGCTAAG | 6564 | GHLPAAK | 8231 | 102.315 |
| 1586 | GAGTTGGGTAATAAGACGGCT | 6565 | ELGNKTA | 8232 | 102.311 |
| 1587 | CTTGAGTCTACTCGTAAGGCT | 6566 | LESTRKA | 8233 | 102.31 |
| 1588 | ACTCAAGGCAACTCTGAAGCA | 6567 | TQGNSEA | 8234 | 102.31 |
| 1589 | ATCTCTATAGACTCCGCTATG | 6568 | ISIDSAM | 8235 | 102.301 |
| 1590 | GAGTTTCAGAGGATTCGTGAG | 6569 | EFQRIRE | 8236 | 102.259 |
| 1591 | GCTAGTCTCTCCGCACCAGCC | 6570 | ASLSAPA | 8237 | 102.227 |
| 1592 | GACAGCCAAATCACAAGACTA | 6571 | DSQITRL | 8238 | 102.218 |
| 1593 | GGCCACGAAAACATGGGCGTG | 6572 | GHENMGV | 8239 | 102.215 |
| 1594 | ATGTCGGCGGGGCATCCTACG | 6573 | MSAGHPT | 8240 | 102.207 |
| 1595 | CACGCTCCAAGCGGCGCCATA | 6574 | HAPSGAI | 8241 | 102.2 |
| 1596 | ACGACTATTACTAATTCGGTT | 6575 | TTITNSV | 8242 | 102.187 |
| 1597 | CCTCAGCATCAGCATGAGCAT | 6576 | PQHQHEH | 8243 | 102.1805 |
| 1598 | CAATACTCGATGGACACGCGC | 6577 | QYSMDTR | 8244 | 102.173 |
| 1599 | CTTTATGAGGTTGGTACTCCT | 6578 | LYEVGTP | 8245 | 102.165 |
| 1600 | GGTGAGACTATGCGTCATAAT | 6579 | GETMRHN | 8246 | 102.119 |
| 1601 | ATGACAATAACCGTCGAACCG | 6580 | MTITVEP | 8247 | 102.096 |
| 1602 | GCGCAGCATCCTGAGCGTTCG | 6581 | AQHPERS | 8248 | 102.084 |
| 1603 | ACGCATGTTGCTAAGCCTGAT | 6582 | THVAKPD | 8249 | 102.082 |
| 1604 | ATGACTGCTAACTTGGTGGAA | 6583 | MTANLVE | 8250 | 102.076 |
| 1605 | AATAGGCAGCGGGATTTTGAG | 6584 | NRQRDFE | 8251 | 102.073 |
| 1606 | TCAAACAGCGCCGACGCGGGG | 6585 | SNSADAG | 8252 | 102.047 |
| 1607 | GGTGAGTATGGTGCGTCGGTT | 6586 | GEYGASV | 8253 | 102.037 |
| 1608 | GACGGCATGGTCAGGTCGACA | 6587 | DGMVRST | 8254 | 102.025 |
| 1609 | AATGGTCAGCTGCTGGCTAAT | 6588 | NGQLLAN | 8255 | 102.023 |
| 1610 | TCCGCGGGGATGACATTGGAC | 6589 | SAGMTLD | 8256 | 102.016 |
| 1611 | GATCATGTGCATCTGACTTAT | 6590 | DHVHLTY | 8257 | 102.008 |
| 1612 | ACGACACTAACGCAAACGGAC | 6591 | TTLTQTD | 8258 | 102.003 |
| 1613 | GTGCAGTTGGCTGATGGGCAT | 6592 | VQLADGH | 8259 | 102.003 |
| 1614 | ACTGACTCATCTGCAGACTCC | 6593 | TDSSADS | 8260 | 101.981 |
| 1615 | GCGATGAATGTGCGGAGTGAT | 6594 | AMNVRSD | 8261 | 101.9805 |
| 1616 | GGTGATATTTCTTATAGGGTT | 6595 | GDISYRV | 8262 | 101.977 |
| 1617 | ATGGGGTATGTTGATAGTCTG | 6596 | MGYVDSL | 8263 | 101.953 |
| 1618 | CTTTATTTGGCGGCGGCTTCG | 6597 | LYLAAAS | 8264 | 101.948 |
| 1619 | TCATCCCCAGACTCGTACAGA | 6598 | SSPDSYR | 8265 | 101.921 |
| 1620 | AGTTATAATGTGGATCTGCAT | 6599 | SYNVDLH | 8266 | 101.892 |
| 1621 | CAACACACCGCCCACCCCATG | 6600 | QHTAHPM | 8267 | 101.892 |
| 1622 | GCAGTTATGGCTACACACCCC | 6601 | AVMATHP | 8268 | 101.87 |
| 1623 | ATTAGTCCGAGTGCTTCTAAT | 6602 | ISPSASN | 8269 | 101.855 |
| 1624 | ACTTTGGATAATAATCATTCT | 6603 | TLDNNHS | 8270 | 101.833 |
| 1625 | AGTGGGTCTTATGTGGCGACG | 6604 | SGSYVAT | 8271 | 101.806 |
| 1626 | ATGGCGGCTCCGCCGGAGCAT | 6605 | MAAPPEH | 8272 | 101.802 |
| 1627 | CAGACTGCGTCTGGTGATACT | 6606 | QTASGDT | 8273 | 101.7725 |
| 1628 | GAGTCTAAGACTGTGGTTATT | 6607 | ESKTVVI | 8274 | 101.7695 |
| 1629 | ACGGTATTACCACAATCAGAC | 6608 | TVLPQSD | 8275 | 101.744 |
| 1630 | CCATTAAACGCGAACGGCTCC | 6609 | PLNANGS | 8276 | 101.7415 |
| 1631 | CCCCTGAACACAGGATTAACC | 6610 | PLNTGLT | 8277 | 101.718 |
| 1632 | GCCATAACGATAATAGGCACT | 6611 | AITIIGT | 8278 | 101.711 |
| 1633 | AATCCTAGTGCGATTAGTTAT | 6612 | NPSAISY | 8279 | 101.687 |
| 1634 | ACAGAACACGAAAAATCCACT | 6613 | TEHEKST | 8280 | 101.66205 |
| 1635 | GCTGAGAGTCAGCTGGCGTCG | 6614 | AESQLAS | 8281 | 101.655 |
| 1636 | GTGCTTAAGGGTACGTTTCCG | 6615 | VLKGTFP | 8282 | 101.652 |
| 1637 | TCGTTCGCCGAAATAACGACT | 6616 | SFAEITT | 8283 | 101.651 |
| 1638 | CCGTTAAACGGCCGCGTAACC | 6617 | PLNGRVT | 8284 | 101.642 |
| 1639 | TCCGAACGCCCCCAATCGTCA | 6618 | SERPQSS | 8285 | 101.579 |
| 1640 | GCTCAGCTTCAGGATTCGGTG | 6619 | AQLQDSV | 8286 | 101.568 |
| 1641 | CCCAACCGTGTAACAGCACCC | 6620 | PNRVTAP | 8287 | 101.5542 |
| 1642 | GCGCTTATTGTTTCGAGTATG | 6621 | ALIVSSM | 8288 | 101.54 |
| 1643 | GCGCATGGTGCTTTTCCGGTT | 6622 | AHGAFPV | 8289 | 101.495 |
| 1644 | GAGGCTTATCAGACTGAGAAG | 6623 | EAYQTEK | 8290 | 101.49 |
| 1645 | GCTGCGGCTTCGCCTTTGGCT | 6624 | AAASPLA | 8291 | 101.484 |
| 1646 | CCCCAAGCCACTCTCAACAAC | 6625 | PQATLNN | 8292 | 101.432 |
| 1647 | ACGAGGGGTGATATGGAGTTT | 6626 | TRGDMEF | 8293 | 101.424 |
| 1648 | AGCAACCTAGGCGAAGCATCT | 6627 | SNLGEAS | 8294 | 101.423 |
| 1649 | GGAATCACCGGAAGCCCCGGC | 6628 | GITGSPG | 8295 | 101.42 |
| 1650 | GGGTTTGAGACGAGTAGTCCT | 6629 | GFETSSP | 8296 | 101.369 |
| 1651 | CCCGCGAGAAGCGACGCCCTT | 6630 | PARSDAL | 8297 | 101.359 |
| 1652 | CATGCTAATTATGTTGAGGTG | 6631 | HANYVEV | 8298 | 101.345 |
| 1653 | GTGACTCGTAGTACGAAGGAG | 6632 | VTRSTKE | 8299 | 101.32381 |
| 1654 | GATGTTGCGTTGAGGTCGAAT | 6633 | DVALRSN | 8300 | 101.254 |
| 1655 | GAGTCTGATTTGCGTCAGCGG | 6634 | ESDLRQR | 8301 | 101.225 |
| 1656 | CCGTTACTCGCAGCGAACCCG | 6635 | PLLAANP | 8302 | 101.207 |
| 1657 | ATAAACGCCGCGCACAGGCCC | 6636 | INAAHRP | 8303 | 101.163 |
| 1658 | GCTCGGAGAGACGTAAACTCG | 6637 | ARRDVNS | 8304 | 101.15 |
| 1659 | AGTATGGATAAGGTGGAGAAG | 6638 | SMDKVEK | 8305 | 101.144 |
| 1660 | AACGTCAGCGCACGGGAAACA | 6639 | NVSARET | 8306 | 101.113 |
| 1661 | CTGACGACGGCTGGTATGTGG | 6640 | LTTAGMW | 8307 | 100.9605 |
| 1662 | GCGCGGGCAGAAGGGGTCTTC | 6641 | ARAEGVF | 8308 | 100.9325 |
| 1663 | CCGAGTGATCATATGCGGACT | 6642 | PSDHMRT | 8309 | 100.8849 |
| 1664 | AGTAGGACGGTTATTTTGTCG | 6643 | SRTVILS | 8310 | 100.8697 |
| 1665 | CAGAGTAATGCTGCTGAGGGT | 6644 | QSNAAEG | 8311 | 100.8152 |
| 1666 | TGGACCGAAACGGCCGCTCAC | 6645 | WTETAAH | 8312 | 100.7753 |
| 1667 | AAGGAGAATCAGCTTAGTAAG | 6646 | KENQLSK | 8313 | 100.7556 |

TABLE 4
CK8 promoter

| Rank | Sequence | SEQ ID NO: |
|---|---|---|
| 1 | RGDLSTP | 13 |
| 2 | RGDLNQY | 14 |
| 3 | RGDLTTP | 15 |
| 4 | RGDATEL | 16 |
| 5 | RGDQLYH | 17 |
| 6 | RGDLSTP | 18 |
| 7 | RGDVAAK | 19 |
| 8 | RGDLTTP | 20 |
| 9 | RGDLNQY | 21 |
| 10 | RGDTMSK | 22 |
| 11 | RGDVAAK | 23 |
| 12 | RGDTMSK | 24 |
| 13 | RGDATEL | 25 |

TABLE 5
MHCK7 promoter

| Rank | Sequence | SEQ ID NO: |
|---|---|---|
| 1 | RGDLTTP | 26 |
| 2 | RGDLNQY | 27 |
| 3 | RGDLSTP | 28 |
| 4 | RGDQLYH | 29 |
| 5 | RGDTMSK | 30 |
| 6 | RGDATEL | 31 |
| 7 | RGDLSTP | 32 |
| 8 | RGDMINT | 33 |
| 9 | RGDLNQY | 34 |
| 10 | RGDTMSK | 35 |
| 11 | RGDLTTP | 36 |
| 12 | RGDLNDS | 37 |

TABLE 6
MHCK7 and CK8 combined.

| Rank | Sequence | SEQ ID NO: |
|---|---|---|
| 1 | RGDLSTP | 38 |
| 2 | RGDLSTP | 39 |
| 3 | RGDLTTP | 40 |
| 4 | RGDLNQY | 41 |
| 5 | RGDQLYH | 41 |
| 6 | RGDATEL | 43 |
| 7 | RGDTMSK | 44 |
| 8 | RGDLNQY | 45 |
| 9 | RGDLTTP | 46 |
| 10 | RGDMINT | 47 |
| 11 | RGDTMSK | 48 |
| 12 | RGDTMNY | 49 |
| 13 | RGDATEL | 50 |

[0149] Also described herein are polynucleotides that encode the engineered AAV capsid described herein. In some embodiments, the engineered AAV capsid encoding polynucleotide can be included in a polynucleotide that is configured to be an AAV genome donor in an AAV vector system that can be used to generate engineered AAV particles described elsewhere herein. In some embodiments the engineered AAV capsid encoding polynucleotide can be operably coupled to a poly adenylation tail. In some embodiments, the poly adenylation tail can be an SV40 poly adenylation tail. In some embodiments, the AAV capsid encoding polynucleotide can be operably coupled to a promoter. In some embodiments, the promoter can be a tissue specific promoter. In some embodiments, the tissue specific promoter is specific for muscle (e.g. cardiac, skeletal, and/or smooth muscle), neurons and supporting cells (e.g. astrocytes, glial cells, Schwann cells, etc.), fat, spleen, liver, kidney, immune cells, spinal fluid cells, synovial fluid cells, skin cells, cartilage, tendons, connective tissue, bone, pancreas, adrenal gland, blood cell, bone marrow cells, placenta, endothelial cells, and combinations thereof. In some embodiments the promoter can be a constitutive promoter. Suitable tissue specific promoters and constitutive promoters are discussed elsewhere herein and are generally known in the art and can be commercially available.

[0150] Suitable muscle specific promoters include, but are not limited to CK8, MHCK7, Myoglobin promoter (Mb), Desmin promoter, muscle creatine kinase promoter (MCK) and variants thereof, and SPc5-12 synthetic promoter.

[0151] Suitable immune cell specific promoters include, but are not limited to, B29 promoter (B cells), CD14 promoter (monocytic cells), CD43 promoter (leukocytes and platelets), CD68 (macrophages), and SV40/CD43 promoter (leukocytes and platelets).

[0152] Suitable blood cell specific promoters include, but are not limited to, CD43 promoter (leukocytes and platelets), CD45 promoter (hematopoietic cells), INF-beta (hematopoietic cells), WASP promoter (hematopoietic cells), SV40/CD43 promoter (leukocytes and platelets), and SV40/CD45 promoter (hematopoietic cells).

[0153] Suitable pancreatic specific promoters include, but are not limited to, the Elastase-1 promoter.

[0154] Suitable endothelial cell specific promoters include, but are not limited to, Fit-1 promoter and ICAM-2 promoter.

[0155] Suitable neuronal tissue/cell specific promoters include, but are not limited to, GFAP promoter (astrocytes), SYN1 promoter (neurons), and NSE/RU5′ (mature neurons).

[0156] Suitable kidney specific promoters include, but are not limited to, NphsI promoter (podocytes).

[0157] Suitable bone specific promoters include, but are not limited to, OG-2 promoter (osteoblasts, odontoblasts).

[0158] Suitable lung specific promoters include, but are not limited to, SP-B prompter (lung).

[0159] Suitable liver specific promoters include, but are not limited to SV40/Alb promoter.

[0160] Suitable heart specific promoters can include, but are not limited to, alpha-MHC.

[0161] Suitable constitutive promoters include, but are not limited to CMV, RSV, SV40, EF1alpha, CAG, and beta-actin.

### Methods of Generating Engineered AAV Capsids

[0162] Also provided herein are methods of generating engineered AAV capsids. The engineered AAV capsid variants can be variants of wild-type AAV capsids. FIGS. 6-8 can illustrate various embodiments of methods capable of generating engineered AAV capsids described herein. Generally, an AAV capsid library can be generated by expressing engineered capsid vectors each containing an engineered AAV capsid polynucleotide previously described in an appropriate AAV producer cell line. See e.g. FIG. 8. It will be appreciated that although FIG. 8 shows a helper-dependent method of AAV particle production, it will be appreciated that this can be done via a helper-free method as well. This can generate an AAV capsid library that can contain one more desired cell-specific engineered AAV capsid variant. As shown in FIG. 6 the AAV capsid library can be administered to various non-human animals for a first round of mRNA-based selection. As shown in FIG. 1, the transduction process by AAVs and related vectors can result in the production of an mRNA molecule that is reflective of the genome of the virus that transduced the cell. As is at least demonstrated in the Examples herein, mRNA based-selection can be more specific and effective to determine a virus particle capable of functionally transducing a cell because it is based on the functional product produced as opposed to just detecting the presence of a virus particle in the cell by measuring the presence of viral DNA.

[0163] After first-round administration, one or more engineered AAV virus particles having a desired capsid variant can then be used to form a filtered AAV capsid library. Desirable AAV virus particles can be identified by measuring the mRNA expression of the capsid variants and determining which variants are highly expressed in the desired cell type(s) as compared to non-desired cells type(s). Those that are highly expressed in the desired cell, tissue, and/or organ type are the desired AAV capsid variant particles. In some embodiments, the AAV capsid variant encoding polynucleotide is under control of a tissue-specific promoter that has selective activity in the desired cell, tissue, or organ.

[0164] The engineered AAV capsid variant particles identified from the first round can then be administered to various non-human animals. In some embodiments, the animals used in the second round of selection and identification are not the same as those animals used for first round selection and identification. Similar to round 1, after administration the top expressing variants in the desired cell, tissue, and/or organ type(s) can be identified by measuring viral mRNA expression in the cells. The top variants identified after round two can then be optionally barcoded and optionally pooled. In some embodiments, top variants from the second round can then be administered to a non-human primate to identify the top cell-specific variant(s), particularly if the end use for the top variant is in humans. Administration at each round can be systemic.

[0165] In some embodiments, the method of generating an AAV capsid variant can include the steps of: (a) expressing a vector system described herein that contains an engineered AAV capsid polynucleotide in a cell to produce engineered AAV virus particle capsid variants; (b) harvesting the engineered AAV virus particle capsid variants produced in step (a); (c) administering engineered AAV virus particle capsid variants to one or more first subjects, wherein the engineered AAV virus particle capsid variants are produced by expressing an engineered AAV capsid variant vector or system thereof in a cell and harvesting the engineered AAV virus particle capsid variants produced by the cell; and (d) identifying one or more engineered AAV capsid variants produced at a significantly high level by one or more specific cells or specific cell types in the one or more first subjects. In this context, “significantly high” can refer to a titer that can range from between about 2×10¹¹ to about 6×10¹² vector genomes per 15 cm dish.

[0166] The method can further include the steps of: (e) administering some or all engineered AAV virus particle capsid variants identified in step (d) to one or more second subjects; and (0 identifying one or more engineered AAV virus particle capsid variants produced at a significantly high level in one or more specific cells or specific cell types in the one or more second subjects. The cell in step (a) can be a prokaryotic cell or a eukaryotic cell. In some embodiments, the administration in step (c), step (e), or both is systemic. In some embodiments, one or more first subjects, one or more second subjects, or both, are non-human mammals. In some embodiments, one or more first subjects, one or more second subjects, or both, are each independently selected from the group consisting of: a wild-type non-human mammal, a humanized non-human mammal, a disease-specific non-human mammal model, and a non-human primate.

### Engineered Vectors and Vector Systems

[0167] Also provided herein are vectors and vector systems that can contain one or more of the engineered AAV capsid polynucleotides described herein. In some embodiments, one or more of the vector systems are suitable to generate and/or identify cell-specific n-mer motifs and/or capsids as previously described. In some embodiments, one or more of the vectors and vector systems described herein are suitable for production of engineered virus particles containing a capsid protein containing an n-mer motif and optionally a cargo that can be used to deliver a cargo to a subject for, by way of example, treatment.

[0168] As used in this context, engineered AAV capsid polynucleotides refers to any one or more of the polynucleotides described herein capable of encoding an engineered AAV capsid as described elsewhere herein and/or polynucleotide(s) capable of encoding one or more engineered AAV capsid proteins described elsewhere herein. Further, where the vector includes an engineered AAV capsid polynucleotide described herein, the vector can also be referred to and considered an engineered vector or system thereof although not specifically noted as such. In embodiments, the vector can contain one or more polynucleotides encoding one or more elements of an engineered AAV capsid described herein. The vectors can be useful in producing bacterial, fungal, yeast, plant cells, animal cells, and transgenic animals that can express one or more components of the engineered AAV capsid described herein. Within the scope of this disclosure are vectors containing one or more of the polynucleotide sequences described herein. One or more of the polynucleotides that are part of the engineered AAV capsid and system thereof described herein can be included in a vector or vector system.

[0169] In some embodiments, the vector can include an engineered AAV capsid polynucleotide having a 3′ polyadenylation signal. In some embodiments, the 3′ polyadenylation is an SV40 polyadenylation signal. In some embodiments the vector does not have splice regulatory elements. In some embodiments, the vector includes one or more minimal splice regulatory elements. In some embodiments, the vector can further include a modified splice regulatory element, wherein the modification inactivates the splice regulatory element. In some embodiments, the modified splice regulatory element is a polynucleotide sequence sufficient to induce splicing, between a rep protein polynucleotide and the engineered AAV capsid protein variant polynucleotide. In some embodiments, the polynucleotide sequence can be sufficient to induce splicing is a splice acceptor or a splice donor. In some embodiments, the AAV capsid polynucleotide is an engineered AAV capsid polynucleotide as described elsewhere herein.

[0170] In some embodiments, the vectors and vector systems suitable for generating and/or identifying cell-specific n-mer motifs and capsid proteins contain an adeno-associated (AAV) capsid protein polynucleotide, wherein the AAV capsid protein polynucleotide comprises a 3′ polyadenylation signal. In certain example embodiments, the vector does not comprise splice regulatory elements. In certain example embodiments, the vector comprises minimal splice regulatory elements. In certain example embodiments, the vector further comprises a modified splice regulatory element, wherein the modification inactivates the splice regulatory element. In certain example embodiments, the modified splice regulatory element is a polynucleotide sequence sufficient to induce splicing, between a rep protein polynucleotide and the capsid protein polynucleotide. In certain example embodiments, the polynucleotide sequence sufficient to induce splicing is a splice acceptor or a splice donor. In certain example embodiments, the polyadenylation signal is an SV40 polyadenylation signal. In certain example embodiments, the AAV capsid polynucleotide is an engineered AAV capsid polynucleotide. In certain example embodiments, the engineered AAV capsid polynucleotide comprises a n-mer motif polynucleotide capable of encoding an n-mer amino acid motif, wherein the n-mer motif comprises three or more amino acids, wherein the n-mer motif polynucleotide is inserted between two codons in the AAV capsid polynucleotide within a region of the AAV capsid polynucleotide capable of encoding a capsid surface. In certain example embodiments, the n-mer motif comprises 3-15 amino acids. In certain example embodiments, the n-mer motif is 6 or 7 amino acids. In certain example embodiments, the n-mer motif polynucleotide is inserted between the codons corresponding to any two contiguous amino acids between amino acids 262-269, 327-332, 382-386, 452-460, 488-505, 527-539, 545-558, 581-593, 704-714, or any combination thereof in an AAV9 capsid polynucleotide or in an analogous position in an AAV2, AAV3, AAV4, AAVS, AAV6, AAV7, AAV8 capsid polynucleotide. In certain example embodiments, the n-mer motif polynucleotide is inserted between the codons corresponding to aa588 and 589 in the AAV9 capsid polynucleotide. In certain example embodiments, the vector is capable of producing AAV virus particles having increased specificity, reduced immunogenicity, or both. In certain example embodiments, the vector is capable of producing AAV virus particles having increased muscle cell, specificity, reduced immunogenicity, or both. In certain example embodiments, the n-mer motif polynucleotide is any polynucleotide in any of Tables 1-6. In certain example embodiments, the n-mer motif polynucleotide is capable of encoding a peptide as in any of Tables 1-6. In certain example embodiments, the n-mer motif polynucleotide is capable of encoding three or more amino acids, wherein the first three amino acids are RGD. In certain example embodiments, the n-mer motif has a polypeptide sequence of RGD or RGDXₙ, where n is 3-15 amino acids and X, where each amino acid present are independently selected from the others from the group of any amino acid. In certain example embodiments, the vector is capable of producing an AAV capsid polypeptide, AAV capsid, or both that have a muscle-specific tropism.

[0171] In some embodiments, a vector system that is capable of generating and/or identifying or useful in a method to generate or identify a cell-specific n-mer motif and/or capsid protein can include a vector as described in the prior paragraph [e.g. para. 0165] and as further described elsewhere herein; an AAV rep protein polynucleotide or portion thereof; and a single promoter operably coupled to the AAV capsid protein, AAV rep protein, or both, wherein the single promoter is the only promoter operably coupled to the AAV capsid protein, AAV rep protein, or both.

[0172] In certain example embodiments herein, are vector systems comprising a vector as in e.g. any one of paragraphs [0020]-[0039] and as further described elsewhere herein; and an AAV rep protein polynucleotide or portion thereof.

[0173] In certain example embodiments, the vector system further comprises a first promoter, wherein the first promoter is operably coupled to the AAV capsid protein, AAV rep protein, or both. In certain example embodiments, the first promoter or the single promoter is a cell-specific promoter. In certain example embodiments, the first promoter or the single promoter is capable of driving high-titer viral production in the absence of an endogenous AAV promoter. In certain example embodiments, the endogenous AAV promoter is p40. In certain example embodiments, the AAV rep protein polynucleotide is operably coupled to the AAV capsid protein. In certain example embodiments, the AAV protein polynucleotide is part of the same vector as the AAV capsid protein polynucleotide. In certain example embodiments, the AAV protein polynucleotide is on a different vector as the AAV capsid protein polynucleotide.

[0174] In some embodiments, the vector or vector system can include a second promoter, which can be optionally coupled to AAV capsid protein, AAV rep protein, or both.

[0175] Described in example embodiments herein are polypeptides encoded by a vector of any one of e.g. paragraphs [0020]-[0039] and as further described elsewhere herein or by a vector system of any one of e.g. paragraphs [0040]-[0048] and as further described elsewhere herein.

[0176] Described in example embodiments herein are cells comprising: a vector of any one of e.g. paragraphs [0020]-[0039] and as further described elsewhere herein, a vector system of any one of e.g. paragraphs [0040]-[0048] and as further described elsewhere herein, a polypeptide as in e.g. paragraph [0049] and as further described elsewhere herein, or any combination thereof.

[0177] In certain example embodiments, the cell is prokaryotic.

[0178] In certain example embodiments, the cell is eukaryotic.

[0179] Described in certain example embodiments herein are engineered adeno-associated virus particles produced by the method comprising: expressing a vector as in any of e.g. paragraphs [0020]-[0039] and as further described elsewhere herein, a vector system as in any one of e.g. paragraphs [0040]-[0048] and as further described elsewhere herein, or both in a cell. In certain example embodiments, the step of expressing the vector system occurs in vitro or ex vivo. In certain example embodiments, the step of expressing the vector system occurs in vivo.

[0180] The vectors and/or vector systems can be used, for example, to express one or more of the engineered AAV capsid polynucleotides in a cell, such as a producer cell, to produce engineered AAV particles containing an engineered AAV capsid described elsewhere herein. Other uses for the vectors and vector systems described herein are also within the scope of this disclosure. In general, and throughout this specification, the term is a tool that allows or facilitates the transfer of an entity from one environment to another. In some contexts, which will be appreciated by those of ordinary skill in the art, “vector” can be a term of art to refer to a nucleic acid molecule capable of transporting another nucleic acid to which it has been linked. A vector can be a replicon, such as a plasmid, phage, or cosmid, into which another DNA segment may be inserted so as to bring about the replication of the inserted segment. Generally, a vector is capable of replication when associated with the proper control elements.

[0181] Vectors include, but are not limited to, nucleic acid molecules that are single-stranded, double-stranded, or partially double-stranded; nucleic acid molecules that comprise one or more free ends, no free ends (e.g. circular); nucleic acid molecules that comprise DNA, RNA, or both; and other varieties of polynucleotides known in the art. One type of vector is a “plasmid,” which refers to a circular double stranded DNA loop into which additional DNA segments can be inserted, such as by standard molecular cloning techniques. Another type of vector is a viral vector, wherein virally-derived DNA or RNA sequences are present in the vector for packaging into a virus (e.g. retroviruses, replication defective retroviruses, adenoviruses, replication defective adenoviruses, and adeno-associated viruses (AAVs)). Viral vectors also include polynucleotides carried by a virus for transfection into a host cell. Certain vectors are capable of autonomous replication in a host cell into which they are introduced (e.g. bacterial vectors having a bacterial origin of replication and episomal mammalian vectors). Other vectors (e.g., non-episomal mammalian vectors) are integrated into the genome of a host cell upon introduction into the host cell, and thereby are replicated along with the host genome. Moreover, certain vectors are capable of directing the expression of genes to which they are operatively-linked. Such vectors are referred to herein as “expression vectors.” Common expression vectors of utility in recombinant DNA techniques are often in the form of plasmids.

[0182] Recombinant expression vectors can be composed of a nucleic acid (e.g. a polynucleotide) of the invention in a form suitable for expression of the nucleic acid in a host cell, which means that the recombinant expression vectors include one or more regulatory elements, which can be selected on the basis of the host cells to be used for expression, that is operatively-linked to the nucleic acid sequence to be expressed. Within a recombinant expression vector, “operably linked” and “operatively-linked” are used interchangeably herein and further defined elsewhere herein. In the context of a vector, the term “operably linked” is intended to mean that the nucleotide sequence of interest is linked to the regulatory element(s) in a manner that allows for expression of the nucleotide sequence (e.g., in an in vitro transcription/translation system or in a host cell when the vector is introduced into the host cell). Advantageous vectors include adeno-associated viruses, and types of such vectors can also be selected for targeting particular types of cells, such as those engineered AAV vectors containing an engineered AAV capsid polynucleotide with a desired cell-specific tropism. These and other embodiments of the vectors and vector systems are described elsewhere herein.

[0183] In some embodiments, the vector can be a bicistronic vector. In some embodiments, a bicistronic vector can be used for one or more elements of the engineered AAV capsid system described herein. In some embodiments, expression of elements of the engineered AAV capsid system described herein can be driven by the a suitable constitutive or tissue specific promoter. Where the element of the engineered AAV capsid system is an RNA, its expression can be driven by a Pol III promoter, such as a U6 promoter. In some embodiments, the two are combined.

### Cell-Based Vector Amplification and Expression

[0184] Vectors can be designed for expression of one or more elements of the engineered AAV capsid system described herein (e.g. nucleic acid transcripts, proteins, enzymes, and combinations thereof) in a suitable host cell. In some embodiments, the suitable host cell is a prokaryotic cell. Suitable host cells include, but are not limited to, bacterial cells, yeast cells, insect cells, and mammalian cells. The vectors can be viral-based or non-viral based. In some embodiments, the suitable host cell is a eukaryotic cell. In some embodiments, the suitable host cell is a suitable bacterial cell. Suitable bacterial cells include, but are not limited to, bacterial cells from the bacteria of the species Escherichia coli. Many suitable strains of E. coli are known in the art for expression of vectors. These include, but are not limited to Pir1, Stb12, Stb13, Stb14, TOP10, XL1 Blue, and XL10 Gold. In some embodiments, the host cell is a suitable insect cell. Suitable insect cells include those from Spodoptera frugiperda. Suitable strains of S. frugiperda cells include, but are not limited, to Sf9 and Sf21. In some embodiments, the host cell is a suitable yeast cell. In some embodiments, the yeast cell can be from Saccharomyces cerevisiae. In some embodiments, the host cell is a suitable mammalian cell. Many types of mammalian cells have been developed to express vectors. Suitable mammalian cells include, but are not limited to, HEK293, Chinese Hamster Ovary Cells (CHOs), mouse myeloma cells, HeLa, U205, A549, HT1080, CAD, P19, NIH 3T3, L929, N2a, MCF-7, Y79, SO-Rb50, HepG G2, DIKX-X11, J558L, Baby hamster kidney cells (BHK), and chicken embryo fibroblasts (CEFs). Suitable host cells are discussed further in Goeddel, GENE EXPRESSION TECHNOLOGY: METHODS IN ENZYMOLOGY 185, Academic Press, San Diego, Calif. (1990).

[0185] In some embodiments, the vector can be a yeast expression vector. Examples of vectors for expression in yeast Saccharomyces cerevisiae include pYepSecl (Baldari, et al., 1987. EMBO J. 6: 229-234), pMFa (Kuijan and Herskowitz, 1982. Cell 30: 933-943), pJRY88 (Schultz et al., 1987. Gene 54: 113-123), pYES2 (Invitrogen Corporation, San Diego, Calif.), and picZ (InVitrogen Corp, San Diego, Calif.). As used herein, a “yeast expression vector” refers to a nucleic acid that contains one or more sequences encoding an RNA and/or polypeptide and may further contain any desired elements that control the expression of the nucleic acid(s), as well as any elements that enable the replication and maintenance of the expression vector inside the yeast cell. Many suitable yeast expression vectors and features thereof are known in the art; for example, various vectors and techniques are illustrated in in Yeast Protocols, 2nd edition, Xiao, W., ed. (Humana Press, New York, 2007) and Buckholz, R. G. and Gleeson, M. A. (1991) Biotechnology (NY) 9(11): 1067-72. Yeast vectors can contain, without limitation, a centromeric (CEN) sequence, an autonomous replication sequence (ARS), a promoter, such as an RNA Polymerase III promoter, operably linked to a sequence or gene of interest, a terminator such as an RNA polymerase III terminator, an origin of replication, and a marker gene (e.g., auxotrophic, antibiotic, or other selectable markers). Examples of expression vectors for use in yeast may include plasmids, yeast artificial chromosomes, 2μ plasmids, yeast integrative plasmids, yeast replicative plasmids, shuttle vectors, and episomal plasmids.

[0186] In some embodiments, the vector is a baculovirus vector or expression vector and can be suitable for expression of polynucleotides and/or proteins in insect cells. Baculovirus vectors available for expression of proteins in cultured insect cells (e.g., SF9 cells) include the pAc series (Smith, et al., 1983. Mol. Cell. Biol. 3: 2156-2165) and the pVL series (Lucklow and Summers, 1989. Virology 170: 31-39). rAAV (recombinant Adeno-associated viral) vectors are preferably produced in insect cells, e.g., Spodoptera frugiperda Sf9 insect cells, grown in serum-free suspension culture. Serum-free insect cells can be purchased from commercial vendors, e.g., Sigma Aldrich (EX-CELL 405).

[0187] In some embodiments, the vector is a mammalian expression vector. In some embodiments, the mammalian expression vector is capable of expressing one or more polynucleotides and/or polypeptides in a mammalian cell. Examples of mammalian expression vectors include, but are not limited to, pCDM8 (Seed, 1987. Nature 329: 840) and pMT2PC (Kaufman, et al., 1987. EMBO J. 6: 187-195). The mammalian expression vector can include one or more suitable regulatory elements capable of controlling expression of the one or more polynucleotides and/or proteins in the mammalian cell. For example, commonly used promoters are derived from polyoma, adenovirus 2, cytomegalovirus, simian virus 40, and others disclosed herein and known in the art. More detail on suitable regulatory elements are described elsewhere herein.

[0188] For other suitable expression vectors and vector systems for both prokaryotic and eukaryotic cells see, e.g., Chapters 16 and 17 of Sambrook, et al., MOLECULAR CLONING: A LABORATORY MANUAL. 2nd ed., Cold Spring Harbor Laboratory, Cold Spring Harbor Laboratory Press, Cold Spring Harbor, N.Y., 1989.

[0189] In some embodiments, the recombinant mammalian expression vector is capable of directing expression of the nucleic acid preferentially in a particular cell type (e.g., tissue-specific regulatory elements are used to express the nucleic acid). Tissue-specific regulatory elements are known in the art. Non-limiting examples of suitable tissue-specific promoters include the albumin promoter (liver-specific; Pinkert, et al., 1987. Genes Dev. 1: 268-277), lymphoid-specific promoters (Calame and Eaton, 1988. Adv. Immunol. 43: 235-275), in particular promoters of T cell receptors (Winoto and Baltimore, 1989. EMBO J. 8: 729-733) and immunoglobulins (Baneiji, et al., 1983. Cell 33: 729-740; Queen and Baltimore, 1983. Cell 33: 741-748), neuron-specific promoters (e.g., the neurofilament promoter; Byrne and Ruddle, 1989. Proc. Natl. Acad. Sci. USA 86: 5473-5477), pancreas-specific promoters (Edlund, et al., 1985. Science 230: 912-916), and mammary gland-specific promoters (e.g., milk whey promoter; U.S. Pat. No. 4,873,316 and European Application Publication No. 264,166). Developmentally-regulated promoters are also encompassed, e.g., the murine hox promoters (Kessel and Gruss, 1990. Science 249: 374-379) and the α-fetoprotein promoter (Campes and Tilghman, 1989. Genes Dev. 3: 537-546). With regards to these prokaryotic and eukaryotic vectors, mention is made of U.S. Pat. No. 6,750,059, the contents of which are incorporated by reference herein in their entirety. Other embodiments can utilize viral vectors, with regards to which mention is made of U.S. patent application Ser. No. 13/092,085, the contents of which are incorporated by reference herein in their entirety. Tissue-specific regulatory elements are known in the art and in this regard, mention is made of U.S. Pat. No. 7,776,321, the contents of which are incorporated by reference herein in their entirety. In some embodiments, a regulatory element can be operably linked to one or more elements of an engineered AAV capsid system so as to drive expression of the one or more elements of the engineered AAV capsid system described herein.

[0190] Vectors may be introduced and propagated in a prokaryote or prokaryotic cell. In some embodiments, a prokaryote is used to amplify copies of a vector to be introduced into a eukaryotic cell or as an intermediate vector in the production of a vector to be introduced into a eukaryotic cell (e.g. amplifying a plasmid as part of a viral vector packaging system). In some embodiments, a prokaryote is used to amplify copies of a vector and express one or more nucleic acids, such as to provide a source of one or more proteins for delivery to a host cell or host organism.

[0191] In some embodiments, the vector can be a fusion vector or fusion expression vector. In some embodiments, fusion vectors add a number of amino acids to a protein encoded therein, such as to the amino terminus, carboxy terminus, or both of a recombinant protein. Such fusion vectors can serve one or more purposes, such as: (i) to increase expression of recombinant protein; (ii) to increase the solubility of the recombinant protein; and (iii) to aid in the purification of the recombinant protein by acting as a ligand in affinity purification. In some embodiments, expression of polynucleotides (such as non-coding polynucleotides) and proteins in prokaryotes can be carried out in Escherichia coli with vectors containing constitutive or inducible promoters directing the expression of either fusion or non-fusion polynucleotides and/or proteins. In some embodiments, the fusion expression vector can include a proteolytic cleavage site, which can be introduced at the junction of the fusion vector backbone or other fusion moiety and the recombinant polynucleotide or protein to enable separation of the recombinant polynucleotide or protein from the fusion vector backbone or other fusion moiety subsequent to purification of the fusion polynucleotide or protein. Such enzymes, and their cognate recognition sequences, include Factor Xa, thrombin and enterokinase. Example fusion expression vectors include pGEX (Pharmacia Biotech Inc; Smith and Johnson, 1988. Gene 67: 31-40), pMAL (New England Biolabs, Beverly, Mass.) and pRIT5 (Pharmacia, Piscataway, N.J.) that fuse glutathione S-transferase (GST), maltose E binding protein, or protein A, respectively, to the target recombinant protein. Examples of suitable inducible non-fusion E. coli expression vectors include pTrc (Amrann et al., (1988) Gene 69:301-315) and pET 11d (Studier et al., GENE EXPRESSION TECHNOLOGY: METHODS IN ENZYMOLOGY 185, Academic Press, San Diego, Calif. (1990) 60-89).

[0192] In some embodiments, one or more vectors driving expression of one or more elements of an engineered AAV capsid system described herein are introduced into a host cell such that expression of the elements of the engineered delivery system described herein direct formation of an engineered AAV capsid system described herein (including but not limited to an engineered gene transfer agent particle, which is described in greater detail elsewhere herein). For example, different elements of the engineered AAV capsid system described herein can each be operably linked to separate regulatory elements on separate vectors. RNA(s) of different elements of the engineered delivery system described herein can be delivered to an animal or mammal or cell thereof to produce an animal or mammal or cell thereof that constitutively or inducibly or conditionally expresses different elements of the engineered AAV capsid system described herein that incorporates one or more elements of the engineered AAV capsid system described herein or contains one or more cells that incorporates and/or expresses one or more elements of the engineered AAV capsid system described herein.

[0193] In some embodiments, two or more of the elements expressed from the same or different regulatory element(s), can be combined in a single vector, with one or more additional vectors providing any components of the system not included in the first vector. Engineered AAV capsid system polynucleotides that are combined in a single vector may be arranged in any suitable orientation, such as one element located 5′ with respect to (“upstream” of) or 3′ with respect to (“downstream” of) a second element. The coding sequence of one element may be located on the same or opposite strand of the coding sequence of a second element, and oriented in the same or opposite direction. =In some embodiments, a single promoter drives expression of a transcript encoding one or more engineered AAV capsid proteins, embedded within one or more intron sequences (e.g., each in a different intron, two or more in at least one intron, or all in a single intron). In some embodiments, the engineered AAV capsid polynucleotides can be operably linked to and expressed from the same promoter.

### Vector Features

[0194] The vectors can include additional features that can confer one or more functionalities to the vector, the polynucleotide to be delivered, a virus particle produced there from, or polypeptide expressed thereof. Such features include, but are not limited to, regulatory elements, selectable markers, molecular identifiers (e.g. molecular barcodes), stabilizing elements, and the like. It will be appreciated by those skilled in the art that the design of the expression vector and additional features included can depend on such factors as the choice of the host cell to be transformed, the level of expression desired, etc.

### Regulatory Elements

[0195] In embodiments, the polynucleotides and/or vectors thereof described herein (such as the engineered AAV capsid polynucleotides of the present invention) can include one or more regulatory elements that can be operatively linked to the polynucleotide. The term “regulatory element” is intended to include promoters, enhancers, internal ribosomal entry sites (IRES) and other expression control elements (e.g., transcription termination signals, such as polyadenylation signals and poly-U sequences). Such regulatory elements are described, for example, in Goeddel, GENE EXPRESSION TECHNOLOGY: METHODS IN ENZYMOLOGY 185, Academic Press, San Diego, Calif. (1990). Regulatory elements include those that direct constitutive expression of a nucleotide sequence in many types of host cell and those that direct expression of the nucleotide sequence only in certain host cells (e.g., tissue-specific regulatory sequences). A tissue-specific promoter can direct expression primarily in a desired tissue of interest, such as muscle, neuron, bone, skin, blood, specific organs (e.g., liver, pancreas), or particular cell types (e.g., lymphocytes). Regulatory elements may also direct expression in a temporal-dependent manner, such as in a cell-cycle dependent or developmental stage-dependent manner, which may or may not also be tissue or cell-type specific. In some embodiments, a vector comprises one or more pol III promoter (e.g., 1, 2, 3, 4, 5, or more pol III promoters), one or more pol II promoters (e.g., 1, 2, 3, 4, 5, or more pol II promoters), one or more pol I promoters (e.g., 1, 2, 3, 4, 5, or more pol I promoters), or combinations thereof. Examples of pol III promoters include, but are not limited to, U6 and H1 promoters. Examples of pol II promoters include, but are not limited to, the retroviral Rous sarcoma virus (RSV) LTR promoter (optionally with the RSV enhancer), the cytomegalovirus (CMV) promoter (optionally with the CMV enhancer) (see, e.g., Boshart et al, Cell, 41:521-530 (1985)), the SV40 promoter, the dihydrofolate reductase promoter, the β-actin promoter, the phosphoglycerol kinase (PGK) promoter, and the EF1α promoter. Also encompassed by the term “regulatory element” are enhancer elements, such as WPRE; CMV enhancers; the R-U5′ segment in LTR of HTLV-I (Mol. Cell. Biol., Vol. 8(1), p. 466-472, 1988); SV40 enhancer; and the intron sequence between exons 2 and 3 of rabbit β-globin (Proc. Natl. Acad. Sci. USA., Vol. 78(3), p. 1527-31, 1981).

[0196] In some embodiments, the regulatory sequence can be a regulatory sequence described in U.S. Pat. No. 7,776,321, U.S. Pat. Pub. No. 2011/0027239, and PCT publication WO 2011/028929, the contents of which are incorporated by reference herein in their entirety. In some embodiments, the vector can contain a minimal promoter. In some embodiments, the minimal promoter is the Mecp2 promoter, tRNA promoter, or U6. In a further embodiment, the minimal promoter is tissue specific. In some embodiments, the length of the vector polynucleotide the minimal promoters and polynucleotide sequences is less than 4.4 Kb.

[0197] To express a polynucleotide, the vector can include one or more transcriptional and/or translational initiation regulatory sequences, e.g. promoters, that direct the transcription of the gene and/or translation of the encoded protein in a cell. In some embodiments a constitutive promoter may be employed. Suitable constitutive promoters for mammalian cells are generally known in the art and include, but are not limited to SV40, CAG, CMV, EF-1α, β-actin, RSV, and PGK. Suitable constitutive promoters for bacterial cells, yeast cells, and fungal cells are generally known in the art, such as a T-7 promoter for bacterial expression and an alcohol dehydrogenase promoter for expression in yeast.

[0198] In some embodiments, the regulatory element can be a regulated promoter. “Regulated promoter” refers to promoters that direct gene expression not constitutively, but in a temporally- and/or spatially-regulated manner, and includes tissue-specific, tissue-preferred and inducible promoters. In some embodiments, the regulated promoter is a tissue specific promoter as previously discussed elsewhere herein. Regulated promoters include conditional promoters and inducible promoters. In some embodiments, conditional promoters can be employed to direct expression of a polynucleotide in a specific cell type, under certain environmental conditions, and/or during a specific state of development. Suitable tissue specific promoters can include, but are not limited to, liver specific promoters (e.g. APOA2, SERPIN A1 (hAAT), CYP3A4, and MIR122), pancreatic cell promoters (e.g. INS, IRS2, Pdx1, Alx3, Ppy), cardiac specific promoters (e.g. Myh6 (alpha MHC), MYL2 (MLC-2v), TNI3 (cTnl), NPPA (ANF), Slc8a1 (Ncx1)), central nervous system cell promoters (SYN1, GFAP, INA, NES, MOBP, MBP, TH, FOXA2 (HNF3 beta)), skin cell specific promoters (e.g. FLG, K14, TGM3), immune cell specific promoters, (e.g. ITGAM, CD43 promoter, CD14 promoter, CD45 promoter, CD68 promoter), urogenital cell specific promoters (e.g. Pbsn, Upk2, Sbp, Fer114), endothelial cell specific promoters (e.g. ENG), pluripotent and embryonic germ layer cell specific promoters (e.g. Oct4, NANOG, Synthetic Oct4, T brachyury, NES, SOX17, FOXA2, MIR122), and muscle cell specific promoter (e.g. Desmin). Other tissue and/or cell specific promoters are discussed elsewhere herein and can be generally known in the art and are within the scope of this disclosure.

[0199] Inducible/conditional promoters can be positively inducible/conditional promoters (e.g. a promoter that activates transcription of the polynucleotide upon appropriate interaction with an activated activator, or an inducer (compound, environmental condition, or other stimulus) or a negative/conditional inducible promoter (e.g. a promoter that is repressed (e.g. bound by a repressor) until the repressor condition of the promotor is removed (e.g. inducer binds a repressor bound to the promoter stimulating release of the promoter by the repressor or removal of a chemical repressor from the promoter environment). The inducer can be a compound, environmental condition, or other stimulus. Thus, inducible/conditional promoters can be responsive to any suitable stimuli such as chemical, biological, or other molecular agents, temperature, light, and/or pH. Suitable inducible/conditional promoters include, but are not limited to, Tet-On, Tet-Off, Lac promoter, pBad, AlcA, LexA, Hsp70 promoter, Hsp90 promoter, pDawn, XVE/OlexA, GVG, and pOp/LhGR.

[0200] Where expression in a plant cell is desired, the components of the engineered AAV capsid system described herein are typically placed under control of a plant promoter, i.e. a promoter operable in plant cells. The use of different types of promoters is envisaged. In some embodiments, inclusion of a engineered AAV capsid system vector in a plant can be for AAV vector production purposes.

[0201] A constitutive plant promoter is a promoter that is able to express the open reading frame (ORF) that it controls in all or nearly all of the plant tissues during all or nearly all developmental stages of the plant (referred to as “constitutive expression”). One non-limiting example of a constitutive promoter is the cauliflower mosaic virus 35S promoter. Different promoters may direct the expression of a gene in different tissues or cell types, or at different stages of development, or in response to different environmental conditions. In particular embodiments, one or more of the engineered AAV capsid system components are expressed under the control of a constitutive promoter, such as the cauliflower mosaic virus 35S promoter issue-preferred promoters can be utilized to target enhanced expression in certain cell types within a particular plant tissue, for instance vascular cells in leaves or roots or in specific cells of the seed. Examples of particular promoters for use in the engineered AAV capsid system are found in Kawamata et al., (1997) Plant Cell Physiol 38:792-803; Yamamoto et al., (1997) Plant J 12:255-65; Hire et al, (1992) Plant Mol Biol 20:207-18, Kuster et al, (1995) Plant Mol Biol 29:759-72, and Capana et al., (1994) Plant Mol Biol 25:681-91.

[0202] Examples of promoters that are inducible and that can allow for spatiotemporal control of gene editing or gene expression may use a form of energy. The form of energy may include but is not limited to sound energy, electromagnetic radiation, chemical energy and/or thermal energy. Examples of inducible systems include tetracycline inducible promoters (Tet-On or Tet-Off), small molecule two-hybrid transcription activations systems (FKBP, ABA, etc.), or light inducible systems (Phytochrome, LOV domains, or cryptochrome)., such as a Light Inducible Transcriptional Effector (LITE) that direct changes in transcriptional activity in a sequence-specific manner. The components of a light inducible system may include one or more elements of the engineered AAV capsid system described herein, a light-responsive cytochrome heterodimer (e.g. from Arabidopsis thaliana), and a transcriptional activation/repression domain. In some embodiments, the vector can include one or more of the inducible DNA binding proteins provided in PCT publication WO 2014/018423 and US Publications, 2015/0291966, 2017/0166903, 2019/0203212, which describe e.g. embodiments of inducible DNA binding proteins and methods of use and can be adapted for use with the present invention.

[0203] In some embodiments, transient or inducible expression can be achieved by including, for example, chemical-regulated promotors, i.e. whereby the application of an exogenous chemical induces gene expression. Modulation of gene expression can also be obtained by including a chemical-repressible promoter, where application of the chemical represses gene expression. Chemical-inducible promoters include, but are not limited to, the maize ln2-2 promoter, activated by benzene sulfonamide herbicide safeners (De Veylder et al., (1997) Plant Cell Physiol 38:568-77), the maize GST promoter (GST-11-27, WO93/01294), activated by hydrophobic electrophilic compounds used as pre-emergent herbicides, and the tobacco PR-1 a promoter (Ono et al., (2004) Biosci Biotechnol Biochem 68:803-7) activated by salicylic acid. Promoters which are regulated by antibiotics, such as tetracycline-inducible and tetracycline-repressible promoters (Gatz et al., (1991) Mol Gen Genet 227:229-37; U.S. Pat. Nos. 5,814,618 and 5,789,156) can also be used herein.

[0204] In some embodiments, the vector or system thereof can include one or more elements capable of translocating and/or expressing an engineered AAV capsid polynucleotide to/in a specific cell component or organelle. Such organelles can include, but are not limited to, nucleus, ribosome, endoplasmic reticulum, golgi apparatus, chloroplast, mitochondria, vacuole, lysosome, cytoskeleton, plasma membrane, cell wall, peroxisome, centrioles, etc.

### Selectable Markers and Tags

[0205] One or more of the engineered AAV capsid polynucleotides can be operably linked, fused to, or otherwise modified to include a polynucleotide that encodes or is a selectable marker or tag, which can be a polynucleotide or polypeptide. In some embodiments, the polypeptide encoding a polypeptide selectable marker can be incorporated in the engineered AAV capsid system polynucleotide such that the selectable marker polypeptide, when translated, is inserted between two amino acids between the N- and C-terminus of the engineered AAV capsid polypeptide or at the N- and/or C-terminus of the engineered AAV capsid polypeptide. In some embodiments, the selectable marker or tag is a polynucleotide barcode or unique molecular identifier (UMI).

[0206] It will be appreciated that the polynucleotide encoding such selectable markers or tags can be incorporated into a polynucleotide encoding one or more components of the engineered AAV capsid system described herein in an appropriate manner to allow expression of the selectable marker or tag. Such techniques and methods are described elsewhere herein and will be instantly appreciated by one of ordinary skill in the art in view of this disclosure. Many such selectable markers and tags are generally known in the art and are intended to be within the scope of this disclosure.

[0207] Suitable selectable markers and tags include, but are not limited to, affinity tags, such as chitin binding protein (CBP), maltose binding protein (MBP), glutathione-S-transferase (GST), poly(His) tag; solubilization tags such as thioredoxin (TRX) and poly(NANP), MBP, and GST; chromatography tags such as those consisting of polyanionic amino acids, such as FLAG-tag; epitope tags such as V5-tag, Myc-tag, HA-tag and NE-tag; protein tags that can allow specific enzymatic modification (such as biotinylation by biotin ligase) or chemical modification (such as reaction with FlAsH-EDT2 for fluorescence imaging), DNA and/or RNA segments that contain restriction enzyme or other enzyme cleavage sites; DNA segments that encode products that provide resistance against otherwise toxic compounds including antibiotics, such as, spectinomycin, ampicillin, kanamycin, tetracycline, Basta, neomycin phosphotransferase II (NEO), hygromycin phosphotransferase (HPT)) and the like; DNA and/or RNA segments that encode products that are otherwise lacking in the recipient cell (e.g., tRNA genes, auxotrophic markers); DNA and/or RNA segments that encode products which can be readily identified (e.g., phenotypic markers such as β-galactosidase, GUS; fluorescent proteins such as green fluorescent protein (GFP), cyan (CFP), yellow (YFP), red (RFP), luciferase, and cell surface proteins); polynucleotides that can generate one or more new primer sites for PCR (e.g., the juxtaposition of two DNA sequences not previously juxtaposed), DNA sequences not acted upon or acted upon by a restriction endonuclease or other DNA modifying enzyme, chemical, etc.; epitope tags (e.g. GFP, FLAG- and His-tags), and, DNA sequences that make a molecular barcode or unique molecular identifier (UMI), DNA sequences required for a specific modification (e.g., methylation) that allows its identification. Other suitable markers will be appreciated by those of skill in the art.

[0208] Selectable markers and tags can be operably linked to one or more components of the engineered AAV capsid system described herein via suitable linker, such as a glycine or glycine serine linkers as short as GS or GG up to (GGGGG)₃ (SEQ ID NO: 8314) or (GGGGS)₃ (SEQ ID NO: 56). Other suitable linkers are described elsewhere herein.

[0209] The vector or vector system can include one or more polynucleotides encoding one or more targeting moieties. In some embodiments, the targeting moiety encoding polynucleotides can be included in the vector or vector system, such as a viral vector system, such that they are expressed within and/or on the virus particle(s) produced such that the virus particles can be targeted to specific cells, tissues, organs, etc. In some embodiments, the targeting moiety encoding polynucleotides can be included in the vector or vector system such that the engineered AAV capsid polynucleotide(s) and/or products expressed therefrom include the targeting moiety and can be targeted to specific cells, tissues, organs, etc. In some embodiments, such as non-viral carriers, the targeting moiety can be attached to the carrier (e.g. polymer, lipid, inorganic molecule etc.) and can be capable of targeting the carrier and any attached or associated engineered AAV capsid polynucleotide(s) to specific cells, tissues, organs, etc.

### Cell-Free Vector and Polynucleotide Expression

[0210] In some embodiments, the polynucleotide encoding one or more features of the engineered AAV capsid system can be expressed from a vector or suitable polynucleotide in a cell-free in vitro system. In other words, the polynucleotide can be transcribed and optionally translated in vitro. In vitro transcription/translation systems and appropriate vectors are generally known in the art and commercially available. Generally, in vitro transcription and in vitro translation systems replicate the processes of RNA and protein synthesis, respectively, outside of the cellular environment. Vectors and suitable polynucleotides for in vitro transcription can include T7, SP6, T3, promoter regulatory sequences that can be recognized and acted upon by an appropriate polymerase to transcribe the polynucleotide or vector.

[0211] In vitro translation can be stand-alone (e.g. translation of a purified polyribonucleotide) or linked/coupled to transcription. In some embodiments, the cell-free (or in vitro) translation system can include extracts from rabbit reticulocytes, wheat germ, and/or E. coli. The extracts can include various macromolecular components that are needed for translation of exogenous RNA (e.g. 70S or 80S ribosomes, tRNAs, aminoacyl-tRNA, synthetases, initiation, elongation factors, termination factors, etc.). Other components can be included or added during the translation reaction, including but not limited to, amino acids, energy sources (ATP, GTP), energy regenerating systems (creatine phosphate and creatine phosphokinase (eukaryotic systems)) (phosphoenol pyruvate and pyruvate kinase for bacterial systems), and other co-factors (Mg2+, K+, etc.). As previously mentioned, in vitro translation can be based on RNA or DNA starting material. Some translation systems can utilize an RNA template as starting material (e.g. reticulocyte lysates and wheat germ extracts). Some translation systems can utilize a DNA template as a starting material (e.g. E coli-based systems). In these systems transcription and translation are coupled and DNA is first transcribed into RNA, which is subsequently translated. Suitable standard and coupled cell-free translation systems are generally known in the art and are commercially available.

### Codon Optimization of Vector Polynucleotides

[0212] As described elsewhere herein, the polynucleotide encoding one or more embodiments of the engineered AAV capsid system described herein can be codon optimized. In some embodiments, one or more polynucleotides contained in a vector (“vector polynucleotides”) described herein that are in addition to an optionally codon optimized polynucleotide encoding embodiments of the engineered AAV capsid system described herein can be codon optimized. In general, codon optimization refers to a process of modifying a nucleic acid sequence for enhanced expression in the host cells of interest by replacing at least one codon (e.g., about or more than about 1, 2, 3, 4, 5, 10, 15, 20, 25, 50, or more codons) of the native sequence with codons that are more frequently or most frequently used in the genes of that host cell while maintaining the native amino acid sequence. Various species exhibit particular bias for certain codons of a particular amino acid. Codon bias (differences in codon usage between organisms) often correlates with the efficiency of translation of messenger RNA (mRNA), which is in turn believed to be dependent on, among other things, the properties of the codons being translated and the availability of particular transfer RNA (tRNA) molecules. The predominance of selected tRNAs in a cell is generally a reflection of the codons used most frequently in peptide synthesis. Accordingly, genes can be tailored for optimal gene expression in a given organism based on codon optimization. Codon usage tables are readily available, for example, at the “Codon Usage Database” available at www.kazusa.orjp/codon/and these tables can be adapted in a number of ways. See Nakamura, Y., et al. “Codon usage tabulated from the international DNA sequence databases: status for the year 2000” Nucl. Acids Res. 28:292 (2000). Computer algorithms for codon optimizing a particular sequence for expression in a particular host cell are also available, such as Gene Forge (Aptagen; Jacobus, P A), are also available. In some embodiments, one or more codons (e.g., 1, 2, 3, 4, 5, 10, 15, 20, 25, 50, or more, or all codons) in a sequence encoding a DNA/RNA-targeting Cas protein corresponds to the most frequently used codon for a particular amino acid. As to codon usage in yeast, reference is made to the online Yeast Genome database available at http://www.yeastgenome.org/community/codon_usage.shtml, or Codon selection in yeast, Bennetzen and Hall, J Biol Chem. 1982 Mar. 25; 257(6):3026-31. As to codon usage in plants including algae, reference is made to Codon usage in higher plants, green algae, and cyanobacteria, Campbell and Gown, Plant Physiol. 1990 January; 92(1): 1-11; as well as Codon usage in plant genes, Murray et al, Nucleic Acids Res. 1989 Jan. 25; 17(2):477-98; or Selection on the codon bias of chloroplast and cyanelle genes in different plant and algal lineages, Morton B R, J Mol Evol. 1998 April; 46(4):449-59.

[0213] The vector polynucleotide can be codon optimized for expression in a specific cell-type, tissue type, organ type, and/or subject type. In some embodiments, a codon optimized sequence is a sequence optimized for expression in a eukaryote, e.g., humans (i.e. being optimized for expression in a human or human cell), or for another eukaryote, such as another animal (e.g. a mammal or avian) as is described elsewhere herein. Such codon optimized sequences are within the ambit of the ordinary skilled artisan in view of the description herein. In some embodiments, the polynucleotide is codon optimized for a specific cell type. Such cell types can include, but are not limited to, epithelial cells (including skin cells, cells lining the gastrointestinal tract, cells lining other hollow organs), nerve cells (nerves, brain cells, spinal column cells, nerve support cells (e.g. astrocytes, glial cells, Schwann cells etc.), muscle cells (e.g. cardiac muscle, smooth muscle cells, and skeletal muscle cells), connective tissue cells (fat and other soft tissue padding cells, bone cells, tendon cells, cartilage cells), blood cells, stem cells and other progenitor cells, immune system cells, germ cells, and combinations thereof. Such codon optimized sequences are within the ambit of the ordinary skilled artisan in view of the description herein. In some embodiments, the polynucleotide is codon optimized for a specific tissue type. Such tissue types can include, but are not limited to, muscle tissue, connective tissue, connective tissue, nervous tissue, and epithelial tissue. Such codon optimized sequences are within the ambit of the ordinary skilled artisan in view of the description herein. In some embodiments, the polynucleotide is codon optimized for a specific organ. Such organs include, but are not limited to, muscles, skin, intestines, liver, spleen, brain, lungs, stomach, heart, kidneys, gallbladder, pancreas, bladder, thyroid, bone, blood vessels, blood, and combinations thereof. Such codon optimized sequences are within the ambit of the ordinary skilled artisan in view of the description herein.

[0214] In some embodiments, a vector polynucleotide is codon optimized for expression in particular cells, such as prokaryotic or eukaryotic cells. The eukaryotic cells may be those of or derived from a particular organism, such as a plant or a mammal, including but not limited to human, or non-human eukaryote or animal or mammal as discussed herein, e.g., mouse, rat, rabbit, dog, livestock, or non-human mammal or primate.

### Non-Viral Vectors and Carriers

[0215] In some embodiments, the vector is a non-viral vector or carrier. In some embodiments, non-viral vectors can have the advantage(s) of reduced toxicity and/or immunogenicity and/or increased bio-safety as compared to viral vectors The terms of art “Non-viral vectors and carriers” and as used herein in this context refers to molecules and/or compositions that are not based on one or more component of a virus or virus genome (excluding any nucleotide to be delivered and/or expressed by the non-viral vector) that can be capable of attaching to, incorporating, coupling, and/or otherwise interacting with an engineered AAV capsid polynucleotide of the present invention and can be capable of ferrying the polynucleotide to a cell and/or expressing the polynucleotide. It will be appreciated that this does not exclude the inclusion of a virus-based polynucleotide that is to be delivered. For example, if a gRNA to be delivered is directed against a virus component and it is inserted or otherwise coupled to an otherwise non-viral vector or carrier, this would not make said vector a “viral vector”. Non-viral vectors and carriers include naked polynucleotides, chemical-based carriers, polynucleotide (non-viral) based vectors, and particle-based carriers. It will be appreciated that the term “vector” as used in the context of non-viral vectors and carriers refers to polynucleotide vectors and “carriers” used in this context refers to a non-nucleic acid or polynucleotide molecule or composition that be attached to or otherwise interact with a polynucleotide to be delivered, such as an engineered AAV capsid polynucleotide of the present invention.

### Naked Polynucleotides

[0216] In some embodiments one or more engineered AAV capsid polynucleotides described elsewhere herein can be included in a naked polynucleotide. The term of art “naked polynucleotide” as used herein refers to polynucleotides that are not associated with another molecule (e.g. proteins, lipids, and/or other molecules) that can often help protect it from environmental factors and/or degradation. As used herein, associated with includes, but is not limited to, linked to, adhered to, adsorbed to, enclosed in, enclosed in or within, mixed with, and the like. Naked polynucleotides that include one or more of the engineered AAV capsid polynucleotides described herein can be delivered directly to a host cell and optionally expressed therein. The naked polynucleotides can have any suitable two- and three-dimensional configurations. By way of non-limiting examples, naked polynucleotides can be single-stranded molecules, double stranded molecules, circular molecules (e.g. plasmids and artificial chromosomes), molecules that contain portions that are single stranded and portions that are double stranded (e.g. ribozymes), and the like. In some embodiments, the naked polynucleotide contains only the engineered AAV capsid polynucleotide(s) of the present invention. In some embodiments, the naked polynucleotide can contain other nucleic acids and/or polynucleotides in addition to the engineered AAV capsid polynucleotide(s) of the present invention. The naked polynucleotides can include one or more elements of a transposon system. Transposons and system thereof are described in greater detail elsewhere herein.

### Non-Viral Polynucleotide Vectors

[0217] In some embodiments, one or more of the engineered AAV capsid polynucleotides can be included in a non-viral polynucleotide vector. Suitable non-viral polynucleotide vectors include, but are not limited to, transposon vectors and vector systems, plasmids, bacterial artificial chromosomes, yeast artificial chromosomes, AR(antibiotic resistance)-free plasmids and miniplasmids, circular covalently closed vectors (e.g. minicircles, minivectors, miniknots,), linear covalently closed vectors (“dumbbell shaped”), MIDGE (minimalistic immunologically defined gene expression) vectors, MiLV (micro-linear vector) vectors, Ministrings, mini-intronic plasmids, PSK systems (post-segregationally killing systems), ORT (operator repressor titration) plasmids, and the like. See e.g. Hardee et al. 2017. Genes. 8(2):65.

[0218] In some embodiments, the non-viral polynucleotide vector can have a conditional origin of replication. In some embodiments, the non-viral polynucleotide vector can be an ORT plasmid. In some embodiments, the non-viral polynucleotide vector can have a minimalistic immunologically defined gene expression. In some embodiments, the non-viral polynucleotide vector can have one or more post-segregationally killing system genes. In some embodiments, the non-viral polynucleotide vector is AR-free. In some embodiments, the non-viral polynucleotide vector is a minivector. In some embodiments, the non-viral polynucleotide vector includes a nuclear localization signal. In some embodiments, the non-viral polynucleotide vector can include one or more CpG motifs. In some embodiments, the non-viral polynucleotide vectors can include one or more scaffold/matrix attachment regions (S/MARs). See e.g. Mirkovitch et al. 1984. Cell. 39:223-232, Wong et al. 2015. Adv. Genet. 89:113-152, whose techniques and vectors can be adapted for use in the present invention. S/MARs are AT-rich sequences that play a role in the spatial organization of chromosomes through DNA loop base attachment to the nuclear matrix. S/MARs are often found close to regulatory elements such as promoters, enhancers, and origins of DNA replication. Inclusion of one or S/MARs can facilitate a once-per-cell-cycle replication to maintain the non-viral polynucleotide vector as an episome in daughter cells. In embodiments, the S/MAR sequence is located downstream of an actively transcribed polynucleotide (e.g. one or more engineered AAV capsid polynucleotides of the present invention) included in the non-viral polynucleotide vector. In some embodiments, the S/MAR can be a S/MAR from the beta-interferon gene cluster. See e.g. Verghese et al. 2014. Nucleic Acid Res. 42:e53; Xu et al. 2016. Sci. China Life Sci. 59:1024-1033; Jin et al. 2016. 8:702-711; Koirala et al. 2014. Adv. Exp. Med. Biol. 801:703-709; and Nehlsen et al. 2006. Gene Ther. Mol. Biol. 10:233-244, whose techniques and vectors can be adapted for use in the present invention.

[0219] In some embodiments, the non-viral vector is a transposon vector or system thereof. As used herein, “transposon” (also referred to as transposable element) refers to a polynucleotide sequence that is capable of moving form location in a genome to another. There are several classes of transposons. Transposons include retrotransposons and DNA transposons. Retrotransposons require the transcription of the polynucleotide that is moved (or transposed) in order to transpose the polynucleotide to a new genome or polynucleotide. DNA transposons are those that do not require reverse transcription of the polynucleotide that is moved (or transposed) in order to transpose the polynucleotide to a new genome or polynucleotide. In some embodiments, the non-viral polynucleotide vector can be a retrotransposon vector. In some embodiments, the retrotransposon vector includes long terminal repeats. In some embodiments, the retrotransposon vector does not include long terminal repeats. In some embodiments, the non-viral polynucleotide vector can be a DNA transposon vector. DNA transposon vectors can include a polynucleotide sequence encoding a transposase. In some embodiments, the transposon vector is configured as a non-autonomous transposon vector, meaning that the transposition does not occur spontaneously on its own. In some of these embodiments, the transposon vector lacks one or more polynucleotide sequences encoding proteins required for transposition. In some embodiments, the non-autonomous transposon vectors lack one or more Ac elements.

[0220] In some embodiments a non-viral polynucleotide transposon vector system can include a first polynucleotide vector that contains the engineered AAV capsid polynucleotide(s) of the present invention flanked on the 5′ and 3′ ends by transposon terminal inverted repeats (TIRs) and a second polynucleotide vector that includes a polynucleotide capable of encoding a transposase coupled to a promoter to drive expression of the transposase. When both are expressed in the same cell the transposase can be expressed from the second vector and can transpose the material between the TIRs on the first vector (e.g. the engineered AAV capsid polynucleotide(s) of the present invention) and integrate it into one or more positions in the host cell's genome. In some embodiments the transposon vector or system thereof can be configured as a gene trap. In some embodiments, the TIRs can be configured to flank a strong splice acceptor site followed by a reporter and/or other gene (e.g. one or more of the engineered AAV capsid polynucleotide(s) of the present invention) and a strong poly A tail. When transposition occurs while using this vector or system thereof, the transposon can insert into an intron of a gene and the inserted reporter or other gene can provoke a mis-splicing process and as a result it in activates the trapped gene.

[0221] Any suitable transposon system can be used. Suitable transposon and systems thereof can include, Sleeping Beauty transposon system (Tcl/mariner superfamily) (see e.g. Ivics et al. 1997. Cell. 91(4): 501-510), piggyBac (piggyBac superfamily) (see e.g. Li et al. 2013 110(25): E2279-E2287 and Yusa et al. 2011. PNAS. 108(4): 1531-1536), Tol2 (superfamily hAT), Frog Prince (Tcl/mariner superfamily) (see e.g. Miskey et al. 2003 Nucleic Acid Res. 31(23):6873-6881) and variants thereof.

### Chemical Carriers

[0222] In some embodiments the engineered AAV capsid polynucleotide(s) can be coupled to a chemical carrier. Chemical carriers that can be suitable for delivery of polynucleotides can be broadly classified into the following classes: (i) inorganic particles, (ii) lipid-based, (iii) polymer-based, and (iv) peptide based. They can be categorized as (1) those that can form condensed complexes with a polynucleotide (such as the engineered AAV capsid polynucleotide(s) of the present invention), (2) those capable of targeting specific cells, (3) those capable of increasing delivery of the polynucleotide (such as the engineered AAV capsid polynucleotide(s) of the present invention) to the nucleus or cytosol of a host cell, (4) those capable of disintegrating from DNA/RNA in the cytosol of a host cell, and (5) those capable of sustained or controlled release. It will be appreciated that any one given chemical carrier can include features from multiple categories. The term “particle” as used herein, refers to any suitable sized particles for delivery of the engineered AAV capsid system components described herein. Suitable sizes include macro-, micro-, and nano-sized particles.

[0223] In some embodiments, the non-viral carrier can be an inorganic particle. In some embodiments, the inorganic particle can be a nanoparticle. The inorganic particles can be configured and optimized by varying size, shape, and/or porosity. In some embodiments, the inorganic particles are optimized to escape from the reticulo endothelial system. In some embodiments, the inorganic particles can be optimized to protect an entrapped molecule from degradation., the Suitable inorganic particles that can be used as non-viral carriers in this context can include, but are not limited to, calcium phosphate, silica, metals (e.g. gold, platinum, silver, palladium, rhodium, osmium, iridium, ruthenium, mercury, copper, rhenium, titanium, niobium, tantalum, and combinations thereof), magnetic compounds, particles, and materials, (e.g. supermagnetic iron oxide and magnetite), quantum dots, fullerenes (e.g. carbon nanoparticles, nanotubes, nanostrings, and the like), and combinations thereof. Other suitable inorganic non-viral carriers are discussed elsewhere herein.

[0224] In some embodiments, the non-viral carrier can be lipid-based. Suitable lipid-based carriers are also described in greater detail herein. In some embodiments, the lipid-based carrier includes a cationic lipid or an amphiphilic lipid that is capable of binding or otherwise interacting with a negative charge on the polynucleotide to be delivered (e.g. such as an engineered AAV capsid polynucleotide of the present invention). In some embodiments, chemical non-viral carrier systems can include a polynucleotide such as the engineered AAV capsid polynucleotide(s) of the present invention) and a lipid (such as a cationic lipid). These are also referred to in the art as lipoplexes. Other embodiments of lipoplexes are described elsewhere herein. In some embodiments, the non-viral lipid-based carrier can be a lipid nano emulsion. Lipid nano emulsions can be formed by the dispersion of an immiscible liquid in another stabilized emulsifying agent and can have particles of about 200 nm that are composed of the lipid, water, and surfactant that can contain the polynucleotide to be delivered (e.g. the engineered AAV capsid polynucleotide(s) of the present invention). In some embodiments, the lipid-based non-viral carrier can be a solid lipid particle or nanoparticle.

[0225] In some embodiments, the non-viral carrier can be peptide-based. In some embodiments, the peptide-based non-viral carrier can include one or more cationic amino acids. In some embodiments, 35 to 40, 45, 50, 55, 60, 65, 70, 75, 80, 85, 90, 95, 99 or 100% of the amino acids are cationic. In some embodiments, peptide carriers can be used in conjunction with other types of carriers (e.g. polymer-based carriers and lipid-based carriers to functionalize these carriers). In some embodiments, the functionalization is targeting a host cell. Suitable polymers that can be included in the polymer-based non-viral carrier can include, but are not limited to, polyethylenimine (PEI), chitosan, poly (DL-lactide) (PLA), poly (DL-Lactide-co-glycoside) (PLGA), dendrimers (see e.g. US Pat. Pub. 2017/0079916 whose techniques and compositions can be adapted for use with the engineered AAV capsid polynucleotides of the present invention), polymethacrylate, and combinations thereof.

[0226] In some embodiments, the non-viral carrier can be configured to release an engineered delivery system polynucleotide that is associated with or attached to the non-viral carrier in response to an external stimulus, such as pH, temperature, osmolarity, concentration of a specific molecule or composition (e.g. calcium, NaCl, and the like), pressure and the like. In some embodiments, the non-viral carrier can be a particle that is configured includes one or more of the engineered AAV capsid polynucleotides describe herein and an environmental triggering agent response element, and optionally a triggering agent. In some embodiments, the particle can include a polymer that can be selected from the group of polymethacrylates and polyacrylates. In some embodiments, the non-viral particle can include one or more embodiments of the compositions microparticles described in US Pat. Pubs. 20150232883 and 20050123596, whose techniques and compositions can be adapted for use in the present invention.

[0227] In some embodiments, the non-viral carrier can be a polymer-based carrier. In some embodiments, the polymer is cationic or is predominantly cationic such that it can interact in a charge-dependent manner with the negatively charged polynucleotide to be delivered (such as the engineered AAV capsid polynucleotide(s) of the present invention). Polymer-based systems are described in greater detail elsewhere herein.

### Viral Vectors

[0228] In some embodiments, the vector is a viral vector. The term of art “viral vector” and as used herein in this context refers to polynucleotide based vectors that contain one or more elements from or based upon one or more elements of a virus that can be capable of expressing and packaging a polynucleotide, such as an engineered AAV capsid polynucleotide of the present invention, into a virus particle and producing said virus particle when used alone or with one or more other viral vectors (such as in a viral vector system). Viral vectors and systems thereof can be used for producing viral particles for delivery of and/or expression of one or more components of the engineered AAV capsid system described herein. The viral vector can be part of a viral vector system involving multiple vectors. In some embodiments, systems incorporating multiple viral vectors can increase the safety of these systems. Suitable viral vectors can include adenoviral-based vectors, adeno associated vectors, helper-dependent adenoviral (HdAd) vectors, hybrid adenoviral vectors, and the like. Other embodiments of viral vectors and viral particles produce therefrom are described elsewhere herein. In some embodiments, the viral vectors are configured to produce replication incompetent viral particles for improved safety of these systems.

### Adenoviral Vectors, Helper-Dependent Adenoviral Vectors, and Hybrid Adenoviral Vectors

[0229] In some embodiments, the vector can be an adenoviral vector. In some embodiments, the adenoviral vector can include elements such that the virus particle produced using the vector or system thereof can be serotype 2, 5, or 9. In some embodiments, the polynucleotide to be delivered via the adenoviral particle can be up to about 8 kb. Thus, in some embodiments, an adenoviral vector can include a DNA polynucleotide to be delivered that can range in size from about 0.001 kb to about 8 kb. Adenoviral vectors have been used successfully in several contexts (see e.g. Teramato et al. 2000. Lancet. 355:1911-1912; Lai et al. 2002. DNA Cell. Biol. 21:895-913; Flotte et al., 1996. Hum. Gene. Ther. 7:1145-1159; and Kay et al. 2000. Nat. Genet. 24:257-261. The engineered AAV capsids can be included in an adenoviral vector to produce adenoviral particles containing said engineered AAV capsids.

[0230] In some embodiments the vector can be a helper-dependent adenoviral vector or system thereof. These are also referred to in the field as “gutless” or “gutted” vectors and are a modified generation of adenoviral vectors (see e.g. Thrasher et al. 2006. Nature. 443:E5-7). In embodiments of the helper-dependent adenoviral vector system one vector (the helper) can contain all the viral genes required for replication but contains a conditional gene defect in the packaging domain. The second vector of the system can contain only the ends of the viral genome, one or more engineered AAV capsid polynucleotides, and the native packaging recognition signal, which can allow selective packaged release from the cells (see e.g. Cideciyan et al. 2009. N Engl J Med. 361:725-727). Helper-dependent Adenoviral vector systems have been successful for gene delivery in several contexts (see e.g. Simonelli et al. 2010. J Am Soc Gene Ther. 18:643-650; Cideciyan et al. 2009. N Engl J Med. 361:725-727; Crane et al. 2012. Gene Ther. 19(4):443-452; Alba et al. 2005. Gene Ther. 12:18-S27; Croyle et al. 2005. Gene Ther. 12:579-587; Amalfitano et al. 1998. J. Virol. 72:926-933; and Morral et al. 1999. PNAS. 96:12816-12821). The techniques and vectors described in these publications can be adapted for inclusion and delivery of the engineered AAV capsid polynucleotides described herein. In some embodiments, the polynucleotide to be delivered via the viral particle produced from a helper-dependent adenoviral vector or system thereof can be up to about 38 kb. Thus, in some embodiments, a adenoviral vector can include a DNA polynucleotide to be delivered that can range in size from about 0.001 kb to about 37 kb (see e.g. Rosewell et al. 2011. J. Genet. Syndr. Gene Ther. Suppl. 5:001).

[0231] In some embodiments, the vector is a hybrid-adenoviral vector or system thereof. Hybrid adenoviral vectors are composed of the high transduction efficiency of a gene-deleted adenoviral vector and the long-term genome-integrating potential of adeno-associated, retroviruses, lentivirus, and transposon based-gene transfer. In some embodiments, such hybrid vector systems can result in stable transduction and limited integration site. See e.g. Balague et al. 2000. Blood. 95:820-828; Morral et al. 1998. Hum. Gene Ther. 9:2709-2716; Kubo and Mitani. 2003. J. Virol. 77(5): 2964-2971; Zhang et al. 2013. PloS One. 8(10) e76771; and Cooney et al. 2015. Mol. Ther. 23(4):667-674), whose techniques and vectors described therein can be modified and adapted for use in the engineered AAV capsid system of the present invention. In some embodiments, a hybrid-adenoviral vector can include one or more features of a retrovirus and/or an adeno-associated virus. In some embodiments the hybrid-adenoviral vector can include one or more features of a spuma retrovirus or foamy virus (FV). See e.g. Ehrhardt et al. 2007. Mol. Ther. 15:146-156 and Liu et al. 2007. Mol. Ther. 15:1834-1841, whose techniques and vectors described therein can be modified and adapted for use in the engineered AAV capsid system of the present invention. Advantages of using one or more features from the FVs in the hybrid-adenoviral vector or system thereof can include the ability of the viral particles produced therefrom to infect a broad range of cells, a large packaging capacity as compared to other retroviruses, and the ability to persist in quiescent (non-dividing) cells. See also e.g. Ehrhardt et al. 2007. Mol. Ther. 156:146-156 and Shuji et al. 2011. Mol. Ther. 19:76-82, whose techniques and vectors described therein can be modified and adapted for use in the engineered AAV capsid system of the present invention.

### Adeno Associated Vectors

[0232] In an embodiment, the engineered vector or system thereof can be an adeno-associated vector (AAV). See, e.g., West et al., Virology 160:38-47 (1987); U.S. Pat. No. 4,797,368; WO 93/24641; Kotin, Human Gene Therapy 5:793-801 (1994); and Muzyczka, J. Clin. Invest. 94:1351 (1994). Although similar to adenoviral vectors in some of their features, AAVs have some deficiency in their replication and/or pathogenicity and thus can be safer that adenoviral vectors. In some embodiments the AAV can integrate into a specific site on chromosome 19 of a human cell with no observable side effects. In some embodiments, the capacity of the AAV vector, system thereof, and/or AAV particles can be up to about 4.7 kb. The AAV vector or system thereof can include one or more engineered capsid polynucleotides described herein.

[0233] The AAV vector or system thereof can include one or more regulatory molecules. In some embodiments the regulatory molecules can be promoters, enhancers, repressors and the like, which are described in greater detail elsewhere herein. In some embodiments, the AAV vector or system thereof can include one or more polynucleotides that can encode one or more regulatory proteins. In some embodiments, the one or more regulatory proteins can be selected from Rep78, Rep68, Rep52, Rep40, variants thereof, and combinations thereof. In some embodiments, the promoter can be a tissue specific promoter as previously discussed. In some embodiments, the tissue specific promoter can drive expression of an engineered capsid AAV capsid polynucleotide described herein.

[0234] The AAV vector or system thereof can include one or more polynucleotides that can encode one or more capsid proteins, such as the engineered AAV capsid proteins described elsewhere herein. The engineered capsid proteins can be capable of assembling into a protein shell (an engineered capsid) of the AAV virus particle. The engineered capsid can have a cell-, tissue, - and/or organ-specific tropism.

[0235] In some embodiments, the AAV vector or system thereof can include one or more adenovirus helper factors or polynucleotides that can encode one or more adenovirus helper factors. Such adenovirus helper factors can include, but are not limited, E1A, E1B, E2A, E4ORF6, and VA RNAs. In some embodiments, a producing host cell line expresses one or more of the adenovirus helper factors.

[0236] The AAV vector or system thereof can be configured to produce AAV particles having a specific serotype. In some embodiments, the serotype can be AAV-1, AAV-2, AAV-3, AAV-4, AAV-5, AAV-6, AAV-8, AAV-9 or any combinations thereof. In some embodiments, the AAV can be AAV1, AAV-2, AAV-5, AAV-9 or any combination thereof. One can select the AAV of the AAV with regard to the cells to be targeted; e.g., one can select AAV serotypes 1, 2, 5, 9 or a hybrid capsid AAV-1, AAV-2, AAV-5, AAV-9 or any combination thereof for targeting brain and/or neuronal cells; and one can select AAV-4 for targeting cardiac tissue; and one can select AAV-8 for delivery to the liver. Thus, in some embodiments, an AAV vector or system thereof capable of producing AAV particles capable of targeting the brain and/or neuronal cells can be configured to generate AAV particles having serotypes 1, 2, 5 or a hybrid capsid AAV-1, AAV-2, AAV-5 or any combination thereof. In some embodiments, an AAV vector or system thereof capable of producing AAV particles capable of targeting cardiac tissue can be configured to generate an AAV particle having an AAV-4 serotype. In some embodiments, an AAV vector or system thereof capable of producing AAV particles capable of targeting the liver can be configured to generate an AAV having an AAV-8 serotype. See also Srivastava. 2017. Curr. Opin. Virol. 21:75-80.

[0237] It will be appreciated that while the different serotypes can provide some level of cell, tissue, and/or organ specificity, each serotype still is multi-tropic and thus can result in tissue-toxicity if using that serotype to target a tissue that the serotype is less efficient in transducing. Thus, in addition to achieving some tissue targeting capacity via selecting an AAV of a particular serotype, it will be appreciated that the tropism of the AAV serotype can be modified by an engineered AAV capsid described herein. As described elsewhere herein, variants of wild-type AAV of any serotype can be generated via a method described herein and determined to have a particular cell-specific tropism, which can be the same or different as that of the reference wild-type AAV serotype. In some embodiments, the cell, tissue, and/or specificity of the wild-type serotype can be enhanced (e.g. made more selective or specific for a particular cell type that the serotype is already biased towards). For example, wild-type AAV-9 is biased towards muscle and brain in humans (see e.g. Srivastava. 2017. Curr. Opin. Virol. 21:75-80.) By including an engineered AAV capsid and/or capsid protein variant of wild-type AAV-9 as described herein, the bias for e.g. brain can be reduced or eliminated and/or the muscle septicity increased such that the brain specificity appears reduced in comparison, thus enhancing the specificity for the muscle as compared to the wild-type AAV-9. As previously mentioned, inclusion of an engineered capsid and/or capsid protein variant of a wild-type AAV serotype can have a different tropism than the wild-type reference AAV serotype. For example, an engineered AAV capsid and/or capsid protein variant of AAV-9 can have specificity for a tissue other than muscle or brain in humans.

[0238] In some embodiments, the AAV vector is a hybrid AAV vector or system thereof. Hybrid AAVs are AAVs that include genomes with elements from one serotype that are packaged into a capsid derived from at least one different serotype. For example, if it is the rAAV2/5 that is to be produced, and if the production method is based on the helper-free, transient transfection method discussed above, the 1st plasmid and the 3rd plasmid (the adeno helper plasmid) will be the same as discussed for rAAV2 production. However, the 2nd plasmid, the pRepCap will be different. In this plasmid, called pRep2/Cap5, the Rep gene is still derived from AAV2, while the Cap gene is derived from AAVS. The production scheme is the same as the above-mentioned approach for AAV2 production. The resulting rAAV is called rAAV2/5, in which the genome is based on recombinant AAV2, while the capsid is based on AAVS. It is assumed the cell or tissue-tropism displayed by this AAV2/5 hybrid virus should be the same as that of AAVS. It will be appreciated that wild-type hybrid AAV particles suffer the same specificity issues as with the non-hybrid wild-type serotypes previously discussed.

[0239] Advantages achieved by the wild-type based hybrid AAV systems can be combined with the increased and customizable cell-specificity that can be achieved with the engineered AAV capsids can be combined by generating a hybrid AAV that can include an engineered AAV capsid described elsewhere herein. It will be appreciated that hybrid AAVs can contain an engineered AAV capsid containing a genome with elements from a different serotype than the reference wild-type serotype that the engineered AAV capsid is a variant of. For example, a hybrid AAV can be produced that includes an engineered AAV capsid that is a variant of an AAV-9 serotype that is used to package a genome that contains components (e.g. rep elements) from an AAV-2 serotype. As with wild-type based hybrid AAVs previously discussed, the tropism of the resulting AAV particle will be that of the engineered AAV capsid.

[0240] A tabulation of certain wild-type AAV serotypes as to these cells can be found in Grimm, D. et al, J. Virol. 82: 5887-5911 (2008) reproduced below as Table 7. Further tropism details can be found in Srivastava. 2017. Curr. Opin. Virol. 21:75-80 as previously discussed.

TABLE 7

| | AAV- | AAV- | AAV- | AAV- | AAV- | AAV- | AAV- | AAV- |
|---|---|---|---|---|---|---|---|---|
| Cell Line | 1 | 2 | 3 | 4 | 5 | 6 | 8 | 9 |
| Huh-7 | 13 | 100 | 2.5 | 0.0 | 0.1 | 10 | 0.7 | 0.0 |
| HEK293 | 25 | 100 | 2.5 | 0.1 | 0.1 | 5 | 0.7 | 0.1 |
| HeLa | 3 | 100 | 2.0 | 0.1 | 6.7 | 1 | 0.2 | 0.1 |
| HepG2 | 3 | 100 | 16.7 | 0.3 | 1.7 | 5 | 0.3 | ND |
| HeplA | 20 | 100 | 0.2 | 1.0 | 0.1 | 1 | 0.2 | 0.0 |
| 911 | 17 | 100 | 11 | 0.2 | 0.1 | 17 | 0.1 | ND |
| CHO | 100 | 100 | 14 | 1.4 | 333 | 50 | 10 | 1.0 |
| COS | 33 | 100 | 33 | 3.3 | 5.0 | 14 | 2.0 | 0.5 |
| MeWo | 10 | 100 | 20 | 0.3 | 6.7 | 10 | 1.0 | 0.2 |
| NIH3T3 | 10 | 100 | 2.9 | 2.9 | 0.3 | 10 | 0.3 | ND |
| A549 | 14 | 100 | 20 | ND | 0.5 | 10 | 0.5 | 0.1 |
| HT1180 | 20 | 100 | 10 | 0.1 | 0.3 | 33 | 0.5 | 0.1 |
| Monocytes | 1111 | 100 | ND | ND | 125 | 1429 | ND | ND |
| Immature | 2500 | 100 | ND | ND | 222 | 2857 | ND | ND |
| DC | | | | | | | | |
| Mature DC | 2222 | 100 | ND | ND | 333 | 3333 | ND | ND |

[0241] In some embodiments, the AAV vector or system thereof is configured as a “gutless” vector, similar to that described in connection with a retroviral vector. In some embodiments, the “gutless” AAV vector or system thereof can have the cis-acting viral DNA elements involved in genome amplification and packaging in linkage with the heterologous sequences of interest (e.g. the engineered AAV capsid polynucleotide(s)).

### Vector Construction

[0242] The vectors described herein can be constructed using any suitable process or technique. In some embodiments, one or more suitable recombination and/or cloning methods or techniques can be used to the vector(s) described herein. Suitable recombination and/or cloning techniques and/or methods can include, but not limited to, those described in U.S. Patent Publication No. US 2004-0171156 A1. Other suitable methods and techniques are described elsewhere herein.

[0243] Construction of recombinant AAV vectors are described in a number of publications, including U.S. Pat. No. 5,173,414; Tratschin et al., Mol. Cell. Biol. 5:3251-3260 (1985); Tratschin, et al., Mol. Cell. Biol. 4:2072-2081 (1984); Hermonat & Muzyczka, PNAS 81:6466-6470 (1984); and Samulski et al., J. Virol. 63:03822-3828 (1989). Any of the techniques and/or methods can be used and/or adapted for constructing an AAV or other vector described herein. AAV vectors are discussed elsewhere herein.

[0244] In some embodiments, the vector can have one or more insertion sites, such as a restriction endonuclease recognition sequence (also referred to as a “cloning site”). In some embodiments, one or more insertion sites (e.g., about or more than about 1, 2, 3, 4, 5, 6, 7, 8, 9, 10, or more insertion sites) are located upstream and/or downstream of one or more sequence elements of one or more vectors.

[0245] Delivery vehicles, vectors, particles, nanoparticles, formulations and components thereof for expression of one or more elements of a engineered AAV capsid system described herein are as used in the foregoing documents, such as WO 2014/093622 (PCT/US2013/074667) and are discussed in greater detail herein.

Virus Particle Production from Viral Vectors

### AAV Particle Production

[0246] There are two main strategies for producing AAV particles from AAV vectors and systems thereof, such as those described herein, which depend on how the adenovirus helper factors are provided (helper v. helper free). In some embodiments, a method of producing AAV particles from AAV vectors and systems thereof can include adenovirus infection into cell lines that stably harbor AAV replication and capsid encoding polynucleotides along with AAV vector containing the polynucleotide to be packaged and delivered by the resulting AAV particle (e.g. the engineered AAV capsid polynucleotide(s)). In some embodiments, a method of producing AAV particles from AAV vectors and systems thereof can be a “helper free” method, which includes co-transfection of an appropriate producing cell line with three vectors (e.g. plasmid vectors): (1) an AAV vector that contains a polynucleotide of interest (e.g. the engineered AAV capsid polynucleotide(s)) between 2 ITRs; (2) a vector that carries the AAV Rep-Cap encoding polynucleotides; and (helper polynucleotides. One of skill in the art will appreciate various methods and variations thereof that are both helper and -helper free and as well as the different advantages of each system.

[0247] The engineered AAV vectors and systems thereof described herein can be produced by any of these methods.

### Vector and Virus Particle Delivery

[0248] A vector (including non-viral carriers) described herein can be introduced into host cells to thereby produce transcripts, proteins, or peptides, including fusion proteins or peptides encoded by nucleic acids as described herein (e.g., engineered AAV capsid system transcripts, proteins, enzymes, mutant forms thereof, fusion proteins thereof, etc.), and virus particles (such as from viral vectors and systems thereof).

[0249] One or more engineered AAV capsid polynucleotides can be delivered using adeno associated virus (AAV), adenovirus or other plasmid or viral vector types as previously described, in particular, using formulations and doses from, for example, U.S. Pat. No. 8,454,972 (formulations, doses for adenovirus), U.S. Pat. No. 8,404,658 (formulations, doses for AAV) and U.S. Pat. No. 5,846,946 (formulations, doses for DNA plasmids) and from clinical trials and publications regarding the clinical trials involving lentivirus, AAV and adenovirus. For examples, for AAV, the route of administration, formulation and dose can be as in U.S. Pat. No. 8,454,972 and as in clinical trials involving AAV. For Adenovirus, the route of administration, formulation and dose can be as in U.S. Pat. No. 8,404,658 and as in clinical trials involving adenovirus.

[0250] For plasmid delivery, the route of administration, formulation and dose can be as in U.S. Pat. No. 5,846,946 and as in clinical studies involving plasmids. In some embodiments, doses can be based on or extrapolated to an average 70 kg individual (e.g. a male adult human), and can be adjusted for patients, subjects, mammals of different weight and species. Frequency of administration is within the ambit of the medical or veterinary practitioner (e.g., physician, veterinarian), depending on usual factors including the age, sex, general health, other conditions of the patient or subject and the particular condition or symptoms being addressed. The viral vectors can be injected into or otherwise delivered to the tissue or cell of interest.

[0251] In terms of in vivo delivery, AAV is advantageous over other viral vectors for a couple of reasons such as low toxicity (this may be due to the purification method not requiring ultra-centrifugation of cell particles that can activate the immune response) and a low probability of causing insertional mutagenesis because it doesn't integrate into the host genome.

[0252] The vector(s) and virus particles described herein can be delivered in to a host cell in vitro, in vivo, and or ex vivo. Delivery can occur by any suitable method including, but not limited to, physical methods, chemical methods, and biological methods. Physical delivery methods are those methods that employ physical force to counteract the membrane barrier of the cells to facilitate intracellular delivery of the vector. Suitable physical methods include, but are not limited to, needles (e.g. injections), ballistic polynucleotides (e.g. particle bombardment, micro projectile gene transfer, and gene gun), electroporation, sonoporation, photoporation, magnetofection, hydroporation, and mechanical massage. Chemical methods are those methods that employ a chemical to elicit a change in the cells membrane permeability or other characteristic(s) to facilitate entry of the vector into the cell. For example, the environmental pH can be altered which can elicit a change in the permeability of the cell membrane. Biological methods are those that rely and capitalize on the host cell's biological processes or biological characteristics to facilitate transport of the vector (with or without a carrier) into a cell. For example, the vector and/or its carrier can stimulate an endocytosis or similar process in the cell to facilitate uptake of the vector into the cell.

[0253] Delivery of engineered AAV capsid system components (e.g. polynucleotides encoding engineered AAV capsid and/or capsid proteins) to cells via particles. The term “particle” as used herein, refers to any suitable sized particles for delivery of the engineered AAV capsid system components described herein. Suitable sizes include macro-, micro-, and nano-sized particles. In some embodiments, any of the of the engineered AAV capsid system components (e.g. polypeptides, polynucleotides, vectors and combinations thereof described herein) can be attached to, coupled to, integrated with, otherwise associated with one or more particles or component thereof as described herein. The particles described herein can then be administered to a cell or organism by an appropriate route and/or technique. In some embodiments, particle delivery can be selected and be advantageous for delivery of the polynucleotide or vector components. It will be appreciated that in embodiments, particle delivery can also be advantageous for other engineered capsid system molecules and formulations described elsewhere herein.

### Engineered Virus Particles Including an Engineered AAV Capsid

[0254] Also described herein are engineered virus particles (also referred to here and elsewhere herein as “engineered AAV particles”) that can contain an engineered AAV capsid as described in detail elsewhere herein. It will be appreciated that the engineered AAV particles can be adenovirus-based particles, helper adenovirus-based particles, AAV-based particles, or hybrid adenovirus-based particles that contain at least one engineered AAV capsid proteins as previously described. An engineered AAV capsid is one that that contains one or more engineered AAV capsid proteins as are described elsewhere herein. In some embodiments, the engineered AAV particles can include 1-60 engineered AAV capsid proteins described herein. In some embodiments, the engineered AAV particles can contain 1, 2, 3, 4, 5, 6, 7, 8, 9, 10, 11, 12, 13, 14, 15, 16, 17, 18, 19, 20, 21, 22, 23, 24, 25, 26, 27, 28, 29, 30, 31, 32, 33, 34, 35, 36, 37, 38, 39, 40, 41, 42, 43, 44, 45, 46, 47, 48, 49, 50, 51, 52, 53, 54, 55, 56, 57, 58, 59, or 60 engineered capsid proteins. In some embodiments, the engineered AAV particles can contain 0-59 wild-type AAV capsid proteins. In some embodiments, the engineered AAV particles can contain 0, 1, 2, 3, 4, 5, 6, 7, 8, 9, 10, 11, 12, 13, 14, 15, 16, 17, 18, 19, 20, 21, 22, 23, 24, 25, 26, 27, 28, 29, 30, 31, 32, 33, 34, 35, 36, 37, 38, 39, 40, 41, 42, 43, 44, 45, 46, 47, 48, 49, 50, 51, 52, 53, 54, 55, 56, 57, 58, or 59 wild-type AAV capsid proteins. The engineered AAV particles can thus include one or more n-mer motifs as is previously described.

[0255] The engineered AAV particle can include one or more cargo polynucleotides. Cargo polynucleotides are discussed in greater detail elsewhere herein. Methods of making the engineered AAV particles from viral and non-viral vectors are described elsewhere herein. Formulations containing the engineered virus particles are described elsewhere herein.

### Cargo Polynucleotides

[0256] The engineered AAV capsid polynucleotides, other AAV polynucleotide(s), and/or vector polynucleotides can contain one or more cargo polynucleotides. In some embodiments, the one or more cargo polynucleotides can be operably linked to the engineered AAV capsid polynucleotide(s) and can be part of the engineered AAV genome of the AAV system of the present invention. The cargo polynucleotides can be packaged into an engineered AAV particle, which can be delivered to, e.g., a cell. In some embodiments, the cargo polynucleotide can be capable of modifying a polynucleotide (e.g. gene or transcript) of a cell to which it is delivered. As used herein, “gene” can refer to a hereditary unit corresponding to a sequence of DNA that occupies a specific location on a chromosome and that contains the genetic instruction for a characteristic(s) or trait(s) in an organism. The term gene can refer to translated and/or untranslated regions of a genome. “Gene” can refer to the specific sequence of DNA that is transcribed into an RNA transcript that can be translated into a polypeptide or be a catalytic RNA molecule, including but not limited to, tRNA, siRNA, piRNA, miRNA, long-non-coding RNA and shRNA. Polynucleotide, gene, transcript, etc. modification includes all genetic engineering techniques including, but not limited to, gene editing as well as conventional recombinational gene modification techniques (e.g. whole or partial gene insertion, deletion, and mutagenesis (e.g. insertional and deletional mutagenesis) techniques.

### Gene Modification Cargo Polynucleotides

[0257] In some embodiments, the cargo molecule can be a polynucleotide or polypeptide that can alone or when delivered as part of a system, whether or not delivered with other components of the system, operate to modify the genome, epigenome, and/or transcriptome of a cell to which it is delivered. Such systems include, but are not limited to, CRISPR-Cas systems. Other gene modification systems, e.g. TALENs, Zinc Finger nucleases, Cre-Lox, etc. are other non-limiting examples of gene modification systems whose one or more components can be delivered by the engineered AAV particles described herein.

[0258] In some embodiments, the cargo molecule is a gene editing system or component thereof. In some embodiments, the cargo molecule is a CRISPR-Cas system molecule or a component thereof. In some embodiments, the cargo molecule is a polynucleotide that encodes one or more components of a gene modification system (such as a CRISPR-Cas system). In some embodiments the cargo molecule is a gRNA.

### CRISPR-Cas System Cargo Molecules

[0259] In some embodiments, the engineered AAV particles can include one or more CRISPR-Cas system molecules, which can be polynucleotides or polypeptides. In some embodiments, the polynucleotides can encode one or more CRISPR-Cas system molecules. In some embodiments, the polynucleotide encodes a Cas protein, a CRISPR Cascade protein, a gRNA, or a combination thereof. Other CRISPR-Cas system molecules are discussed elsewhere herein and can be delivered either as a polypeptide or a polynucleotide.

[0260] In general, a CRISPR-Cas or CRISPR system as used in herein and in documents, such as International Patent Publication No. WO 2014/093622 (PCT/US2013/074667), refers collectively to transcripts and other elements involved in the expression of or directing the activity of CRISPR-associated (“Cas”) genes, including sequences encoding a Cas gene, a tracr (trans-activating CRISPR) sequence (e.g. tracrRNA or an active partial tracrRNA), a tracr-mate sequence (encompassing a “direct repeat” and a tracrRNA-processed partial direct repeat in the context of an endogenous CRISPR system), a guide sequence (also referred to as a “spacer” in the context of an endogenous CRISPR system), or “RNA(s)” as that term is herein used (e.g., RNA(s) to guide Cas, such as Cas9, e.g. CRISPR RNA and transactivating (tracr) RNA or a single guide RNA (sgRNA) (chimeric RNA)) or other sequences and transcripts from a CRISPR locus. In general, a CRISPR system is characterized by elements that promote the formation of a CRISPR complex at the site of a target sequence (also referred to as a protospacer in the context of an endogenous CRISPR system). See, e.g., Shmakov et al. (2015) “Discovery and Functional Characterization of Diverse Class 2 CRISPR-Cas Systems”, Molecular Cell, DOI: dx.doi.org/10.1016/j.molcel.2015.10.008.

[0261] In certain embodiments, a protospacer adjacent motif (PAM) or PAM-like motif directs binding of the effector protein complex as disclosed herein to the target locus of interest. In some embodiments, the PAM may be a 5′ PAM (i.e., located upstream of the 5′ end of the protospacer). In other embodiments, the PAM may be a 3′ PAM (i.e., located downstream of the 5′ end of the protospacer). The term “PAM” may be used interchangeably with the term “PFS” or “protospacer flanking site” or “protospacer flanking sequence”.

[0262] In a preferred embodiment, the CRISPR effector protein may recognize a 3′ PAM. In certain embodiments, the CRISPR effector protein may recognize a 3′ PAM which is 5′H, wherein H is A, C or U.

[0263] In the context of formation of a CRISPR complex, “target sequence” refers to a sequence to which a guide sequence is designed to have complementarity, where hybridization between a target sequence and a guide sequence promotes the formation of a CRISPR complex. A target sequence may comprise RNA polynucleotides. The term “target RNA” refers to a RNA polynucleotide being or comprising the target sequence. In other words, the target RNA may be a RNA polynucleotide or a part of a RNA polynucleotide to which a part of the gRNA, i.e. the guide sequence is designed to have complementarity and to which the effector function mediated by the complex comprising CRISPR effector protein and a gRNA is to be directed. In some embodiments, a target sequence is located in the nucleus or cytoplasm of a cell.

[0264] In certain example embodiments, the CRISPR effector protein may be delivered using a nucleic acid molecule encoding the CRISPR effector protein. The nucleic acid molecule encoding a CRISPR effector protein may advantageously be a codon optimized CRISPR effector protein. An example of a codon optimized sequence is, in this instance, a sequence optimized for expression in eukaryote, e.g., humans (i.e. being optimized for expression in humans), or for another eukaryote, animal or mammal as herein discussed; see, e.g., SaCas9 human codon optimized sequence in International Patent Publication No. WO 2014/093622 (PCT/US2013/074667). Whilst this is preferred, it will be appreciated that other examples are possible and codon optimization for a host species other than human, or for codon optimization for specific organs is known. In some embodiments, an enzyme coding sequence encoding a CRISPR effector protein is a codon optimized for expression in particular cells, such as eukaryotic cells. The eukaryotic cells may be those of or derived from a particular organism, such as a plant or a mammal, including but not limited to human, or non-human eukaryote or animal or mammal as herein discussed, e.g., mouse, rat, rabbit, dog, livestock, or non-human mammal or primate. In some embodiments, processes for modifying the germ line genetic identity of human beings and/or processes for modifying the genetic identity of animals which are likely to cause them suffering without any substantial medical benefit to man or animal, and also animals resulting from such processes, may be excluded. In general, codon optimization refers to a process of modifying a nucleic acid sequence for enhanced expression in the host cells of interest by replacing at least one codon (e.g. about or more than about 1, 2, 3, 4, 5, 10, 15, 20, 25, 50, or more codons) of the native sequence with codons that are more frequently or most frequently used in the genes of that host cell while maintaining the native amino acid sequence. Various species exhibit particular bias for certain codons of a particular amino acid. Codon bias (differences in codon usage between organisms) often correlates with the efficiency of translation of messenger RNA (mRNA), which is in turn believed to be dependent on, among other things, the properties of the codons being translated and the availability of particular transfer RNA (tRNA) molecules. The predominance of selected tRNAs in a cell is generally a reflection of the codons used most frequently in peptide synthesis. Accordingly, genes can be tailored for optimal gene expression in a given organism based on codon optimization. Codon usage tables are readily available, for example, at the “Codon Usage Database” available at kazusa.orjp/codon/and these tables can be adapted in a number of ways. See Nakamura, Y., et al. “Codon usage tabulated from the international DNA sequence databases: status for the year 2000” Nucl. Acids Res. 28:292 (2000). Computer algorithms for codon optimizing a particular sequence for expression in a particular host cell are also available, such as Gene Forge (Aptagen; Jacobus, P A), are also available. In some embodiments, one or more codons (e.g. 1, 2, 3, 4, 5, 10, 15, 20, 25, 50, or more, or all codons) in a sequence encoding a Cas correspond to the most frequently used codon for a particular amino acid.

[0265] In certain embodiments, the methods as described herein may comprise providing a Cas transgenic cell in which one or more nucleic acids encoding one or more guide RNAs are provided or introduced operably connected in the cell with a regulatory element comprising a promoter of one or more gene of interest. As used herein, the term “Cas transgenic cell” refers to a cell, such as a eukaryotic cell, in which a Cas gene has been genomically integrated. The nature, type, or origin of the cell are not particularly limiting according to the present invention. Also, the way the Cas transgene is introduced in the cell may vary and can be any method as is known in the art. In certain embodiments, the Cas transgenic cell is obtained by introducing the Cas transgene in an isolated cell. In certain other embodiments, the Cas transgenic cell is obtained by isolating cells from a Cas transgenic organism. By means of example, and without limitation, the Cas transgenic cell as referred to herein may be derived from a Cas transgenic eukaryote, such as a Cas knock-in eukaryote. Reference is made to WO 2014/093622 (PCT/US13/74667), incorporated herein by reference. Methods of US Patent Publication Nos. 20120017290 and 20110265198 assigned to Sangamo BioSciences, Inc. directed to targeting the Rosa locus may be modified to utilize the CRISPR Cas system of the present invention. Methods of US Patent Publication No. 20130236946 assigned to Cellectis directed to targeting the Rosa locus may also be modified to utilize the CRISPR Cas system of the present invention. By means of further example reference is made to Platt et. al. (Cell; 159(2):440-455 (2014)), describing a Cas9 knock-in mouse, which is incorporated herein by reference. The Cas transgene can further comprise a Lox-Stop-polyA-Lox(LSL) cassette thereby rendering Cas expression inducible by Cre recombinase. Alternatively, the Cas transgenic cell may be obtained by introducing the Cas transgene in an isolated cell. Delivery systems for transgenes are well known in the art. By means of example, the Cas transgene may be delivered in for instance eukaryotic cell by means of vector (e.g., AAV, adenovirus, lentivirus) and/or particle and/or nanoparticle delivery, as also described herein elsewhere. Lentiviral and retroviral systems, as well as non-viral systems for delivering CRISPR-Cas system components are generally known in the art. AAV and adenovirus-based systems for CRISPR-Cas system components are generally known in the art as well as described herein (e.g. the engineered AAVs of the present invention).

[0266] It will be understood by the skilled person that the cell, such as the Cas transgenic cell, as referred to herein may comprise further genomic alterations besides having an integrated Cas gene or the mutations arising from the sequence specific action of Cas when complexed with RNA capable of guiding Cas to a target locus.

[0267] In certain embodiments, the invention involves vectors, e.g. for delivering or introducing in a cell Cas and/or RNA capable of guiding Cas to a target locus (i.e. guide RNA), but also for propagating these components (e.g. in prokaryotic cells). This can be in addition to delivery of one or more CRISPR-Cas components or other gene modification system component not already being delivered by an engineered AAV particle described herein. A used herein, a “vector” is a tool that allows or facilitates the transfer of an entity from one environment to another. It is a replicon, such as a plasmid, phage, or cosmid, into which another DNA segment may be inserted so as to bring about the replication of the inserted segment. Generally, a vector is capable of replication when associated with the proper control elements. In general, the term “vector” refers to a nucleic acid molecule capable of transporting another nucleic acid to which it has been linked. Vectors include, but are not limited to, nucleic acid molecules that are single-stranded, double-stranded, or partially double-stranded; nucleic acid molecules that comprise one or more free ends, no free ends (e.g. circular); nucleic acid molecules that comprise DNA, RNA, or both; and other varieties of polynucleotides known in the art. One type of vector is a “plasmid,” which refers to a circular double stranded DNA loop into which additional DNA segments can be inserted, such as by standard molecular cloning techniques. Another type of vector is a viral vector, wherein virally-derived DNA or RNA sequences are present in the vector for packaging into a virus (e.g. retroviruses, replication defective retroviruses, adenoviruses, replication defective adenoviruses, and adeno-associated viruses (AAVs)). Viral vectors also include polynucleotides carried by a virus for transfection into a host cell. Certain vectors are capable of autonomous replication in a host cell into which they are introduced (e.g. bacterial vectors having a bacterial origin of replication and episomal mammalian vectors). Other vectors (e.g., non-episomal mammalian vectors) are integrated into the genome of a host cell upon introduction into the host cell, and thereby are replicated along with the host genome. Moreover, certain vectors are capable of directing the expression of genes to which they are operatively-linked. Such vectors are referred to herein as “expression vectors.” Common expression vectors of utility in recombinant DNA techniques are often in the form of plasmids.

[0268] Recombinant expression vectors can comprise a nucleic acid of the invention in a form suitable for expression of the nucleic acid in a host cell, which means that the recombinant expression vectors include one or more regulatory elements, which may be selected on the basis of the host cells to be used for expression, that is operatively-linked to the nucleic acid sequence to be expressed. Within a recombinant expression vector, “operably linked” is intended to mean that the nucleotide sequence of interest is linked to the regulatory element(s) in a manner that allows for expression of the nucleotide sequence (e.g., in an in vitro transcription/translation system or in a host cell when the vector is introduced into the host cell). With regards to recombination and cloning methods, mention is made of U.S. patent application Ser. No. 10/815,730, published Sep. 2, 2004 as US 2004-0171156 A1, the contents of which are herein incorporated by reference in their entirety. Thus, the embodiments disclosed herein may also comprise transgenic cells comprising the CRISPR effector system. In certain example embodiments, the transgenic cell may function as an individual discrete volume. In other words, samples comprising a masking construct may be delivered to a cell, for example in a suitable delivery vesicle and if the target is present in the delivery vesicle the CRISPR effector is activated and a detectable signal generated.

[0269] The vector(s) can include the regulatory element(s), e.g., promoter(s). The vector(s) can comprise Cas encoding sequences, and/or a single, but possibly also can comprise at least 3 or 8 or 16 or 32 or 48 or 50 guide RNA(s) (e.g., sgRNAs) encoding sequences, such as 1-2, 1-3, 1-4 1-5, 3-6, 3-7, 3-8, 3-9, 3-10, 3-8, 3-16, 3-30, 3-32, 3-48, 3-50 RNA(s) (e.g., sgRNAs). In a single vector there can be a promoter for each RNA (e.g., sgRNA), advantageously when there are up to about 16 RNA(s); and, when a single vector provides for more than 16 RNA(s), one or more promoter(s) can drive expression of more than one of the RNA(s), e.g., when there are 32 RNA(s), each promoter can drive expression of two RNA(s), and when there are 48 RNA(s), each promoter can drive expression of three RNA(s). By simple arithmetic and well established cloning protocols and the teachings in this disclosure one skilled in the art can readily practice the invention as to the RNA(s) for a suitable exemplary vector such as AAV, and a suitable promoter such as the U6 promoter. For example, the packaging limit of AAV is ˜4.7 kb. The length of a single U6-gRNA (plus restriction sites for cloning) is 361 bp. Therefore, the skilled person can readily fit about 12-16, e.g., 13 U6-gRNA cassettes in a single vector. This can be assembled by any suitable means, such as a golden gate strategy used for TALE assembly (genome-engineering.org/taleffectors/). The skilled person can also use a tandem guide strategy to increase the number of U6-gRNAs by approximately 1.5 times, e.g., to increase from 12-16, e.g., 13 to approximately 18-24, e.g., about 19 U6-gRNAs. Therefore, one skilled in the art can readily reach approximately 18-24, e.g., about 19 promoter-RNAs, e.g., U6-gRNAs in a single vector, e.g., an AAV vector. A further means for increasing the number of promoters and RNAs in a vector is to use a single promoter (e.g., U6) to express an array of RNAs separated by cleavable sequences. And an even further means for increasing the number of promoter-RNAs in a vector, is to express an array of promoter-RNAs separated by cleavable sequences in the intron of a coding sequence or gene; and, in this instance it is advantageous to use a polymerase II promoter, which can have increased expression and enable the transcription of long RNA in a tissue specific manner. (see, e.g., nar.oxfordjournals.org/content/34/7/e53.short and nature.com/mt/journal/v16/n⁹/abs/mt2008144a.html). In an advantageous embodiment, AAV may package U6 tandem gRNA targeting up to about 50 genes. Accordingly, from the knowledge in the art and the teachings in this disclosure the skilled person can readily make and use vector(s), e.g., a single vector, expressing multiple RNAs or guides under the control or operatively or functionally linked to one or more promoters-especially as to the numbers of RNAs or guides discussed herein, without any undue experimentation.

[0270] The guide RNA(s) encoding sequences and/or Cas encoding sequences can be functionally or operatively linked to regulatory element(s) and hence the regulatory element(s) drive expression. The promoter(s) can be constitutive promoter(s) and/or conditional promoter(s) and/or inducible promoter(s) and/or tissue specific promoter(s). The promoter can be selected from the group consisting of RNA polymerases, pol I, pol II, pol III, T7, U6, H1, retroviral Rous sarcoma virus (RSV) LTR promoter, the cytomegalovirus (CMV) promoter, the SV40 promoter, the dihydrofolate reductase promoter, the β-actin promoter, the phosphoglycerol kinase (PGK) promoter, and the EF1α promoter. An advantageous promoter is the promoter is U6.

[0271] Additional effectors for use according to the invention can be identified by their proximity to cas1 genes, for example, though not limited to, within the region 20 kb from the start of the cas1 gene and 20 kb from the end of the cas1 gene. In certain embodiments, the effector protein comprises at least one HEPN domain and at least 500 amino acids, and wherein the C2c2 effector protein is naturally present in a prokaryotic genome within 20 kb upstream or downstream of a Cas gene or a CRISPR array. Non-limiting examples of Cas proteins include Cas1, Cas1B, Cas2, Cas3, Cas4, Cas5, Cas6, Cas7, Cas8, Cas9 (also known as Csn1 and Csx12), Cas10, Cas 12, Cas 12a, Cas 13a, Cas 13b, Csy1, Csy2, Csy3, Cse1, Cse2, Csc1, Csc2, Csa5, Csn2, Csm2, Csm3, Csm4, Csm5, Csm6, Cmr1, Cmr3, Cmr4, Cmr5, Cmr6, Csb1, Csb2, Csb3, Csx17, Csx14, Csx10, Csx16, CsaX, Csx3, Csx1, Csx15, Csf1, Csf2, Csf3, Csf4, homologues thereof, or modified versions thereof. In certain example embodiments, the C2c2 effector protein is naturally present in a prokaryotic genome within 20 kb upstream or downstream of a Cas 1 gene. The terms “orthologue” (also referred to as “ortholog” herein) and “homologue” (also referred to as “homolog” herein) are well known in the art. By means of further guidance, a “homologue” of a protein as used herein is a protein of the same species which performs the same or a similar function as the protein it is a homologue of. Homologous proteins may but need not be structurally related, or, are only partially structurally related. An “orthologue” of a protein as used herein is a protein of a different species which performs the same or a similar function as the protein it is an orthologue of Orthologous proteins may but need not be structurally related, or, are only partially structurally related.

[0272] In some embodiments, one or more elements of a nucleic acid-targeting system is derived from a particular organism comprising an endogenous CRISPR RNA-targeting system. In certain embodiments, the CRISPR RNA-targeting system is found in Eubacterium and Ruminococcus. In certain embodiments, the effector protein comprises targeted and collateral ssRNA cleavage activity. In certain embodiments, the effector protein comprises dual HEPN domains. In certain embodiments, the effector protein lacks a counterpart to the Helical-1 domain of Cas13a. In certain embodiments, the effector protein is smaller than previously characterized class 2 CRISPR effectors, with a median size of 928 aa. This median size is 190 aa (17%) less than that of Cas13c, more than 200 aa (18%) less than that of Cas13b, and more than 300 aa (26%) less than that of Cas13a. In certain embodiments, the effector protein has no requirement for a flanking sequence (e.g., PFS, PAM).

[0273] In certain embodiments, the effector protein locus structures include a WYL domain containing accessory protein (so denoted after three amino acids that were conserved in the originally identified group of these domains; see, e.g., WYL domain IPR026881). In certain embodiments, the WYL domain accessory protein comprises at least one helix-turn-helix (HTH) or ribbon-helix-helix (RHH) DNA-binding domain. In certain embodiments, the WYL domain containing accessory protein increases both the targeted and the collateral ssRNA cleavage activity of the RNA-targeting effector protein. In certain embodiments, the WYL domain containing accessory protein comprises an N-terminal RHH domain, as well as a pattern of primarily hydrophobic conserved residues, including an invariant tyrosine-leucine doublet corresponding to the original WYL motif. In certain embodiments, the WYL domain containing accessory protein is WYL1. WYL1 is a single WYL-domain protein associated primarily with Ruminococcus.

[0274] In other example embodiments, the Type VI RNA-targeting Cas enzyme is Cas 13d. In certain embodiments, Cas13d is Eubacterium siraeum DSM 15702 (EsCas13d) or Ruminococcus sp. N15.MGS-57 (RspCas13d) (see, e.g., Yan et al., Cas13d Is a Compact RNA-Targeting Type VI CRISPR Effector Positively Modulated by a WYL-Domain-Containing Accessory Protein, Molecular Cell (2018), doi.org/10.1016/j.molce1.2018.02.028). RspCas13d and EsCas13d have no flanking sequence requirements (e.g., PFS, PAM).

[0275] The methods, systems, and tools provided herein may be designed for use with Class 1 CRISPR proteins, which may be Type I, Type III or Type IV Cas proteins as described in Makarova et al., The CRISPR Journal, v. 1, n., 5 (2018); DOI: 10.1089/crispr.2018.0033, incorporated in its entirety herein by reference, and particularly as described in FIG. 1, p. 326. The Class 1 systems typically use a multi-protein effector complex, which can, in some embodiments, include ancillary proteins, such as one or more proteins in a complex referred to as a CRISPR-associated complex for antiviral defense (Cascade), one or more adaptation proteins (e.g. Cas1, Cas2, RNA nuclease), and/or one or more accessory proteins (e.g. Cas 4, DNA nuclease), CRISPR associated Rossman fold (CARF) domain containing proteins, and/or RNA transcriptase. Although Class 1 systems have limited sequence similarity, Class 1 system proteins can be identified by their similar architectures, including one or more Repeat Associated Mysterious Protein (RAMP) family subunits, e.g. Cas 5, Cas6, Cas7. RAMP proteins are characterized by having one or more RNA recognition motif domains. Large subunits (for example cas8 or cas10) and small subunits (for example, cas 11) are also typical of Class 1 systems. See, e.g., FIGS. 1 and 2. Koonin E V, Makarova K S. 2019 Origins and evolution of CRISPR-Cas systems. Phil. Trans. R. Soc. B 374: 20180087, DOI: 10.1098/rstb.2018.0087. In one embodiment, Class 1 systems are characterized by the signature protein Cas3. The Cascade in particular Class1 proteins can comprise a dedicated complex of multiple Cas proteins that binds pre-crRNA and recruits an additional Cas protein, for example Cas6 or Cas5, which is the nuclease directly responsible for processing pre-crRNA. In one embodiment, the Type I CRISPR protein comprises an effector complex comprises one or more Cas5 subunits and two or more Cas7 subunits. Class 1 subtypes include Type I-A, I-B, I-C, I-U, I-D, I-E, and I-F, Type IV-A and IV-B, and Type III-A, III-D, and III-B. Class 1 systems also include CRISPR-Cas variants, including Type I-A, I-B, I-E, I-F and I-U variants, which can include variants carried by transposons and plasmids, including versions of subtype I-F encoded by a large family of Tn7-like transposon and smaller groups of Tn7-like transposons that encode similarly degraded subtype I-B systems. Peters et al., PNAS 114 (35) (2017); DOI: 10.1073/pnas.1709035114; see also, Makarova et al, the CRISPR Journal, v. 1, n5, FIG. 5.

### Cas Molecules

[0276] In some embodiments, the cargo molecule can be or include a Cas polypeptide and/or a polynucleotide that can encode a Cas polypeptide or a fragment thereof. Any Cas molecule can be a cargo molecule. In some embodiments, the cargo molecule is Class I CRISPR-Cas system Cas polypeptide. In some embodiments, the cargo molecule is a Class II CRISPR-Cas system Cas polypeptide. In some embodiments, the Cas polypeptide is a Type I Cas polypeptides. In some embodiments, the Cas polypeptide is a Type II Cas polypeptides. In some embodiments, the Cas polypeptides is a Type III Cas polypeptide. In some embodiments, the Cas polypeptides is a Type IV Cas polypeptide. In some embodiments, the Cas polypeptides is a Type V Cas polypeptide. In some embodiments, the Cas polypeptides is a Type VI Cas polypeptide. In some embodiments, the Cas polypeptides is a Type VII Cas polypeptide. Non-limiting examples of Cas proteins include Cas1, Cas1B, Cas2, Cas3, Cas4, Cas5, Cas6, Cas7, Cas8, Cas9 (also known as Csn1 and Csx12), Cas10, Cas 12, Cas 12a, Cas 13a, Cas 13b, Cas 13c, Cas 13d, Csy1, Csy2, Csy3, Cse1, Cse2, Csc1, Csc2, Csa5, Csn2, Csm2, Csm3, Csm4, Csm5, Csm6, Cmr1, Cmr3, Cmr4, Cmr5, Cmr6, Csb1, Csb2, Csb3, Csx17, Csx14, Csx10, Csx16, CsaX, Csx3, Csxl, Csx15, Csfl, Csf2, Csf3, Csf4, homologues thereof, or modified versions thereof.

### Guide Sequences

[0277] As used herein, the terms “guide sequence” and “guide molecule” in the context of a CRISPR-Cas system comprise any polynucleotide sequence having sufficient complementarity with a target nucleic acid sequence to hybridize with the target nucleic acid sequence and direct sequence-specific binding of a nucleic acid-targeting complex to the target nucleic acid sequence. The guide sequences made using the methods disclosed herein may be a full-length guide sequence, a truncated guide sequence, a full-length sgRNA sequence, a truncated sgRNA sequence, or an E+F sgRNA sequence. Each gRNA may be designed to include multiple binding recognition sites (e.g., aptamers) specific to the same or different adapter protein. Each gRNA may be designed to bind to the promoter region −1000−+1 nucleic acids upstream of the transcription start site (i.e. TSS), preferably −200 nucleic acids. This positioning improves functional domains which affect gene activation (e.g., transcription activators) or gene inhibition (e.g., transcription repressors). The modified gRNA may be one or more modified gRNAs targeted to one or more target loci (e.g., at least 1 gRNA, at least 2 gRNA, at least 5 gRNA, at least 10 gRNA, at least 20 gRNA, at least 30 g RNA, at least 50 gRNA) comprised in a composition. Said multiple gRNA sequences can be tandemly arranged and are preferably separated by a direct repeat.

[0278] In some embodiments, the degree of complementarily of the guide sequence to a given target sequence, when optimally aligned using a suitable alignment algorithm, is about or more than about 50%, 60%, 75%, 80%, 85%, 90%, 95%, 97.5%, 99%, or more. In certain example embodiments, the guide molecule comprises a guide sequence that may be designed to have at least one mismatch with the target sequence, such that a RNA duplex formed between the guide sequence and the target sequence. Accordingly, the degree of complementarity is preferably less than 99%. For instance, where the guide sequence consists of 24 nucleotides, the degree of complementarity is more particularly about 96% or less. In particular embodiments, the guide sequence is designed to have a stretch of two or more adjacent mismatching nucleotides, such that the degree of complementarity over the entire guide sequence is further reduced. For instance, where the guide sequence consists of 24 nucleotides, the degree of complementarity is more particularly about 96% or less, more particularly, about 92% or less, more particularly about 88% or less, more particularly about 84% or less, more particularly about 80% or less, more particularly about 76% or less, more particularly about 72% or less, depending on whether the stretch of two or more mismatching nucleotides encompasses 2, 3, 4, 5, 6 or 7 nucleotides, etc. In some embodiments, aside from the stretch of one or more mismatching nucleotides, the degree of complementarity, when optimally aligned using a suitable alignment algorithm, is about or more than about 50%, 60%, 75%, 80%, 85%, 90%, 95%, 97.5%, 99%, or more. Optimal alignment may be determined with the use of any suitable algorithm for aligning sequences, non-limiting example of which include the Smith-Waterman algorithm, the Needleman-Wunsch algorithm, algorithms based on the Burrows-Wheeler Transform (e.g., the Burrows Wheeler Aligner), Clustal W, Clustal X, BLAT, Novoalign (Novocraft Technologies; available at www.novocraft.com), ELAND (Illumina, San Diego, Calif.), SOAP (available at soap.genomics.org.cn), and Maq (available at maq.sourceforge.net). The ability of a guide sequence (within a nucleic acid-targeting guide RNA) to direct sequence-specific binding of a nucleic acid-targeting complex to a target nucleic acid sequence may be assessed by any suitable assay. For example, the components of a nucleic acid-targeting CRISPR system sufficient to form a nucleic acid-targeting complex, including the guide sequence to be tested, may be provided to a host cell having the corresponding target nucleic acid sequence, such as by transfection with vectors encoding the components of the nucleic acid-targeting complex, followed by an assessment of preferential targeting (e.g., cleavage) within the target nucleic acid sequence, such as by Surveyor assay as described herein. Similarly, cleavage of a target nucleic acid sequence (or a sequence in the vicinity thereof) may be evaluated in a test tube by providing the target nucleic acid sequence, components of a nucleic acid-targeting complex, including the guide sequence to be tested and a control guide sequence different from the test guide sequence, and comparing binding or rate of cleavage at or in the vicinity of the target sequence between the test and control guide sequence reactions. Other assays are possible and will occur to those skilled in the art. A guide sequence, and hence a nucleic acid-targeting guide RNA, may be selected to target any target nucleic acid sequence.

[0279] As used herein, the term “crRNA” or “guide RNA” or “single guide RNA” or “sgRNA” or “one or more nucleic acid components” of a Type V or Type VI CRISPR-Cas locus effector protein comprises any polynucleotide sequence having sufficient complementarity with a target nucleic acid sequence to hybridize with the target nucleic acid sequence and direct sequence-specific binding of a nucleic acid-targeting complex to the target nucleic acid sequence. In some embodiments, the degree of complementarity, when optimally aligned using a suitable alignment algorithm, is about or more than about 50%, 60%, 75%, 80%, 85%, 90%, 95%, 97.5%, 99%, or more. Optimal alignment may be determined with the use of any suitable algorithm for aligning sequences, non-limiting example of which include the Smith-Waterman algorithm, the Needleman-Wunsch algorithm, algorithms based on the Burrows-Wheeler Transform (e.g., the Burrows Wheeler Aligner), Clustal W, Clustal X, BLAT, Novoalign (Novocraft Technologies; available at www.novocraft.com), ELAND (Illumina, San Diego, Calif.), SOAP (available at soap.genomics.org.cn), and Maq (available at maq.sourceforge.net). The ability of a guide sequence (within a nucleic acid-targeting guide RNA) to direct sequence-specific binding of a nucleic acid-targeting complex to a target nucleic acid sequence may be assessed by any suitable assay. For example, the components of a nucleic acid-targeting CRISPR system sufficient to form a nucleic acid-targeting complex, including the guide sequence to be tested, may be provided to a host cell having the corresponding target nucleic acid sequence, such as by transfection with vectors encoding the components of the nucleic acid-targeting complex, followed by an assessment of preferential targeting (e.g., cleavage) within the target nucleic acid sequence, such as by Surveyor assay as described herein. Similarly, cleavage of a target nucleic acid sequence may be evaluated in a test tube by providing the target nucleic acid sequence, components of a nucleic acid-targeting complex, including the guide sequence to be tested and a control guide sequence different from the test guide sequence, and comparing binding or rate of cleavage at the target sequence between the test and control guide sequence reactions. Other assays are possible and will occur to those skilled in the art. A guide sequence, and hence a nucleic acid-targeting guide, may be selected to target any target nucleic acid sequence. The target sequence may be DNA. The target sequence may be any RNA sequence. In some embodiments, the target sequence may be a sequence within a RNA molecule selected from the group consisting of messenger RNA (mRNA), pre-mRNA, ribosomal RNA (rRNA), transfer RNA (tRNA), micro-RNA (miRNA), small interfering RNA (siRNA), small nuclear RNA (snRNA), small nucleolar RNA (snoRNA), double stranded RNA (dsRNA), non-coding RNA (ncRNA), long non-coding RNA (lncRNA), and small cytoplasmatic RNA (scRNA). In some preferred embodiments, the target sequence may be a sequence within a RNA molecule selected from the group consisting of mRNA, pre-mRNA, and rRNA. In some preferred embodiments, the target sequence may be a sequence within a RNA molecule selected from the group consisting of ncRNA, and lncRNA. In some more preferred embodiments, the target sequence may be a sequence within an mRNA molecule or a pre-mRNA molecule.

[0280] In some embodiments, a nucleic acid-targeting guide is selected to reduce the degree secondary structure within the nucleic acid-targeting guide. In some embodiments, about or less than about 75%, 50%, 40%, 30%, 25%, 20%, 15%, 10%, 5%, 1%, or fewer of the nucleotides of the nucleic acid-targeting guide participate in self-complementary base pairing when optimally folded. Optimal folding may be determined by any suitable polynucleotide folding algorithm. Some programs are based on calculating the minimal Gibbs free energy. An example of one such algorithm is mFold, as described by Zuker and Stiegler (Nucleic Acids Res. 9 (1981), 133-148). Another example folding algorithm is the online webserver RNAfold, developed at Institute for Theoretical Chemistry at the University of Vienna, using the centroid structure prediction algorithm (see e.g., A. R. Gruber et al., 2008, Cell 106(1): 23-24; and P A Carr and G M Church, 2009, Nature Biotechnology 27(12): 1151-62).

[0281] In certain embodiments, a guide RNA or crRNA may comprise, consist essentially of, or consist of a direct repeat (DR) sequence and a guide sequence or spacer sequence. In certain embodiments, the guide RNA or crRNA may comprise, consist essentially of, or consist of a direct repeat sequence fused or linked to a guide sequence or spacer sequence. In certain embodiments, the direct repeat sequence may be located upstream (i.e., 5′) from the guide sequence or spacer sequence. In other embodiments, the direct repeat sequence may be located downstream (i.e., 3′) from the guide sequence or spacer sequence.

[0282] In certain embodiments, the crRNA comprises a stem loop, preferably a single stem loop. In certain embodiments, the direct repeat sequence forms a stem loop, preferably a single stem loop.

[0283] In certain embodiments, the spacer length of the guide RNA is from 15 to 35 nt. In certain embodiments, the spacer length of the guide RNA is at least 15 nucleotides. In certain embodiments, the spacer length is from 15 to 17 nt, e.g., 15, 16, or 17 nt, from 17 to 20 nt, e.g., 17, 18, 19, or 20 nt, from 20 to 24 nt, e.g., 20, 21, 22, 23, or 24 nt, from 23 to 25 nt, e.g., 23, 24, or 25 nt, from 24 to 27 nt, e.g., 24, 25, 26, or 27 nt, from 27-30 nt, e.g., 27, 28, 29, or 30 nt, from 30-35 nt, e.g., 30, 31, 32, 33, 34, or 35 nt, or 35 nt or longer.

[0284] The “tracrRNA” sequence or analogous terms includes any polynucleotide sequence that has sufficient complementarity with a crRNA sequence to hybridize. In some embodiments, the degree of complementarity between the tracrRNA sequence and crRNA sequence along the length of the shorter of the two when optimally aligned is about or more than about 25%, 30%, 40%, 50%, 60%, 70%, 80%, 90%, 95%, 97.5%, 99%, or higher. In some embodiments, the tracr sequence is about or more than about 5, 6, 7, 8, 9, 10, 11, 12, 13, 14, 15, 16, 17, 18, 19, 20, 25, 30, 40, 50, or more nucleotides in length. In some embodiments, the tracr sequence and crRNA sequence are contained within a single transcript, such that hybridization between the two produces a transcript having a secondary structure, such as a hairpin. In an embodiment of the invention, the transcript or transcribed polynucleotide sequence has at least two or more hairpins. In preferred embodiments, the transcript has two, three, four or five hairpins. In a further embodiment of the invention, the transcript has at most five hairpins. In a hairpin structure the portion of the sequence 5′ of the final “N” and upstream of the loop corresponds to the tracr mate sequence, and the portion of the sequence 3′ of the loop corresponds to the tracr sequence.

[0285] In general, degree of complementarity is with reference to the optimal alignment of the sca sequence and tracr sequence, along the length of the shorter of the two sequences. Optimal alignment may be determined by any suitable alignment algorithm, and may further account for secondary structures, such as self-complementarity within either the sca sequence or tracr sequence. In some embodiments, the degree of complementarity between the tracr sequence and sca sequence along the length of the shorter of the two when optimally aligned is about or more than about 25%, 30%, 40%, 50%, 60%, 70%, 80%, 90%, 95%, 97.5%, 99%, or higher.

[0286] In general, the CRISPR-Cas, CRISPR-Cas9 or CRISPR system may be as used in the foregoing documents, such as International Patent Publication No. WO 2014/093622 (PCT/US2013/074667) and refers collectively to transcripts and other elements involved in the expression of or directing the activity of CRISPR-associated (“Cas”) genes, including sequences encoding a Cas gene, in particular a Cas9 gene in the case of CRISPR-Cas9, a tracr (trans-activating CRISPR) sequence (e.g. tracrRNA or an active partial tracrRNA), a tracr-mate sequence (encompassing a “direct repeat” and a tracrRNA-processed partial direct repeat in the context of an endogenous CRISPR system), a guide sequence (also referred to as a “spacer” in the context of an endogenous CRISPR system), or “RNA(s)” as that term is herein used (e.g., RNA(s) to guide Cas9, e.g. CRISPR RNA and transactivating (tracr) RNA or a single guide RNA (sgRNA) (chimeric RNA)) or other sequences and transcripts from a CRISPR locus. In general, a CRISPR system is characterized by elements that promote the formation of a CRISPR complex at the site of a target sequence (also referred to as a protospacer in the context of an endogenous CRISPR system). In the context of formation of a CRISPR complex, “target sequence” refers to a sequence to which a guide sequence is designed to have complementarity, where hybridization between a target sequence and a guide sequence promotes the formation of a CRISPR complex. The section of the guide sequence through which complementarity to the target sequence is important for cleavage activity is referred to herein as the seed sequence. A target sequence may comprise any polynucleotide, such as DNA or RNA polynucleotides. In some embodiments, a target sequence is located in the nucleus or cytoplasm of a cell, and may include nucleic acids in or from mitochondrial, organelles, vesicles, liposomes or particles present within the cell. In some embodiments, especially for non-nuclear uses, NLSs are not preferred. In some embodiments, a CRISPR system comprises one or more nuclear exports signals (NESs). In some embodiments, a CRISPR system comprises one or more NLSs and one or more NESs. In some embodiments, direct repeats may be identified in silico by searching for repetitive motifs that fulfill any or all of the following criteria: 1. found in a 2 Kb window of genomic sequence flanking the type II CRISPR locus; 2. span from 20 to 50 bp; and 3. interspaced by 20 to 50 bp. In some embodiments, 2 of these criteria may be used, for instance 1 and 2, 2 and 3, or 1 and 3. In some embodiments, all 3 criteria may be used.

[0287] In embodiments of the invention the terms guide sequence and guide RNA, i.e. RNA capable of guiding Cas to a target genomic locus, are used interchangeably as in foregoing cited documents such as International Patent Publication No. WO 2014/093622 (PCT/US2013/074667). In general, a guide sequence is any polynucleotide sequence having sufficient complementarity with a target polynucleotide sequence to hybridize with the target sequence and direct sequence-specific binding of a CRISPR complex to the target sequence. In some embodiments, the degree of complementarity between a guide sequence and its corresponding target sequence, when optimally aligned using a suitable alignment algorithm, is about or more than about 50%, 60%, 75%, 80%, 85%, 90%, 95%, 97.5%, 99%, or more. Optimal alignment may be determined with the use of any suitable algorithm for aligning sequences, non-limiting example of which include the Smith-Waterman algorithm, the Needleman-Wunsch algorithm, algorithms based on the Burrows-Wheeler Transform (e.g. the Burrows Wheeler Aligner), Clustal W, Clustal X, BLAT, Novoalign (Novocraft Technologies; available at www.novocraft.com), ELAND (Illumina, San Diego, Calif.), SOAP (available at soap.genomics.org.cn), and Maq (available at maq.sourceforge.net). In some embodiments, a guide sequence is about or more than about 5, 10, 11, 12, 13, 14, 15, 16, 17, 18, 19, 20, 21, 22, 23, 24, 25, 26, 27, 28, 29, 30, 35, 40, 45, 50, 75, or more nucleotides in length. In some embodiments, a guide sequence is less than about 75, 50, 45, 40, 35, 30, 25, 20, 15, 12, or fewer nucleotides in length. Preferably, the guide sequence is 10 30 nucleotides long. The ability of a guide sequence to direct sequence-specific binding of a CRISPR complex to a target sequence may be assessed by any suitable assay. For example, the components of a CRISPR system sufficient to form a CRISPR complex, including the guide sequence to be tested, may be provided to a host cell having the corresponding target sequence, such as by transfection with vectors encoding the components of the CRISPR sequence, followed by an assessment of preferential cleavage within the target sequence, such as by Surveyor assay as described herein. Similarly, cleavage of a target polynucleotide sequence may be evaluated in a test tube by providing the target sequence, components of a CRISPR complex, including the guide sequence to be tested and a control guide sequence different from the test guide sequence, and comparing binding or rate of cleavage at the target sequence between the test and control guide sequence reactions. Other assays are possible, and will occur to those skilled in the art.

[0288] In some embodiments of CRISPR-Cas systems, the degree of complementarity between a guide sequence and its corresponding target sequence can be about or more than about 50%, 60%, 75%, 80%, 85%, 90%, 95%, 97.5%, 99%, or 100%; a guide or RNA or sgRNA can be about or more than about 5, 10, 11, 12, 13, 14, 15, 16, 17, 18, 19, 20, 21, 22, 23, 24, 25, 26, 27, 28, 29, 30, 35, 40, 45, 50, 75, or more nucleotides in length; or guide or RNA or sgRNA can be less than about 75, 50, 45, 40, 35, 30, 25, 20, 15, 12, or fewer nucleotides in length; and advantageously tracr RNA is 30 or 50 nucleotides in length. However, an embodiment of the invention is to reduce off-target interactions, e.g., reduce the guide interacting with a target sequence having low complementarity. Indeed, in the examples, it is shown that the invention involves mutations that result in the CRISPR-Cas system being able to distinguish between target and off-target sequences that have greater than 80% to about 95% complementarity, e.g., 83%-84% or 88-89% or 94-95% complementarity (for instance, distinguishing between a target having 18 nucleotides from an off-target of 18 nucleotides having 1, 2 or 3 mismatches). Accordingly, in the context of the present invention the degree of complementarity between a guide sequence and its corresponding target sequence is greater than 94.5% or 95% or 95.5% or 96% or 96.5% or 97% or 97.5% or 98% or 98.5% or 99% or 99.5% or 99.9%, or 100%. Off target is less than 100% or 99.9% or 99.5% or 99% or 99% or 98.5% or 98% or 97.5% or 97% or 96.5% or 96% or 95.5% or 95% or 94.5% or 94% or 93% or 92% or 91% or 90% or 89% or 88% or 87% or 86% or 85% or 84% or 83% or 82% or 81% or 80% complementarity between the sequence and the guide, with it advantageous that off target is 100% or 99.9% or 99.5% or 99% or 99% or 98.5% or 98% or 97.5% or 97% or 96.5% or 96% or 95.5% or 95% or 94.5% complementarity between the sequence and the guide.

[0289] In particularly preferred embodiments according to the invention, the guide RNA (capable of guiding Cas to a target locus) may comprise (1) a guide sequence capable of hybridizing to a genomic target locus in the eukaryotic cell; (2) a tracr sequence; and (3) a tracr mate sequence. All (1) to (3) may reside in a single RNA, i.e. an sgRNA (arranged in a 5′ to 3′ orientation), or the tracr RNA may be a different RNA than the RNA containing the guide and tracr sequence. The tracr hybridizes to the tracr mate sequence and directs the CRISPR/Cas complex to the target sequence. Where the tracr RNA is on a different RNA than the RNA containing the guide and tracr sequence, the length of each RNA may be optimized to be shortened from their respective native lengths, and each may be independently chemically modified to protect from degradation by cellular RNase or otherwise increase stability.

[0290] The methods according to the invention as described herein comprehend inducing one or more mutations in a eukaryotic cell (in vitro, i.e. in an isolated eukaryotic cell) as herein discussed comprising delivering to cell a vector as herein discussed. The mutation(s) can include the introduction, deletion, or substitution of one or more nucleotides at each target sequence of cell(s) via the guide(s) RNA(s) or sgRNA(s). The mutations can include the introduction, deletion, or substitution of 1-75 nucleotides at each target sequence of said cell(s) via the guide(s) RNA(s) or sgRNA(s). The mutations can include the introduction, deletion, or substitution of 1, 5, 10, 11, 12, 13, 14, 15, 16, 17, 18, 19, 20, 21, 22, 23, 24, 25, 26, 27, 28, 29, 30, 35, 40, 45, 50, or 75 nucleotides at each target sequence of said cell(s) via the guide(s) RNA(s) or sgRNA(s). The mutations can include the introduction, deletion, or substitution of 5, 10, 11, 12, 13, 14, 15, 16, 17, 18, 19, 20, 21, 22, 23, 24, 25, 26, 27, 28, 29, 30, 35, 40, 45, 50, or 75 nucleotides at each target sequence of said cell(s) via the guide(s) RNA(s) or sgRNA(s). The mutations include the introduction, deletion, or substitution of 10, 11, 12, 13, 14, 15, 16, 17, 18, 19, 20, 21, 22, 23, 24, 25, 26, 27, 28, 29, 30, 35, 40, 45, 50, or 75 nucleotides at each target sequence of said cell(s) via the guide(s) RNA(s) or sgRNA(s). The mutations can include the introduction, deletion, or substitution of 20, 21, 22, 23, 24, 25, 26, 27, 28, 29, 30, 35, 40, 45, 50, or 75 nucleotides at each target sequence of said cell(s) via the guide(s) RNA(s) or sgRNA(s). The mutations can include the introduction, deletion, or substitution of 40, 45, 50, 75, 100, 200, 300, 400 or 500 nucleotides at each target sequence of said cell(s) via the guide(s) RNA(s) or sgRNA(s).

[0291] For minimization of toxicity and off-target effect, it may be important to control the concentration of Cas mRNA and guide RNA delivered. Optimal concentrations of Cas mRNA and guide RNA can be determined by testing different concentrations in a cellular or non-human eukaryote animal model and using deep sequencing the analyze the extent of modification at potential off-target genomic loci. Alternatively, to minimize the level of toxicity and off-target effect, Cas nickase mRNA (for example S. pyogenes Cas9 with the D10A mutation) can be delivered with a pair of guide RNAs targeting a site of interest. Guide sequences and strategies to minimize toxicity and off-target effects can be as in International Patent Publication No. WO 2014/093622 (PCT/US2013/074667); or, via mutation as herein.

[0292] Typically, in the context of an endogenous CRISPR system, formation of a CRISPR complex (comprising a guide sequence hybridized to a target sequence and complexed with one or more Cas proteins) results in cleavage of one or both strands in or near (e.g. within 1, 2, 3, 4, 5, 6, 7, 8, 9, 10, 20, 50, or more base pairs from) the target sequence. Without wishing to be bound by theory, the tracr sequence, which may comprise or consist of all or a portion of a wild-type tracr sequence (e.g. about or more than about 20, 26, 32, 45, 48, 54, 63, 67, 85, or more nucleotides of a wild-type tracr sequence), may also form part of a CRISPR complex, such as by hybridization along at least a portion of the tracr sequence to all or a portion of a tracr mate sequence that is operably linked to the guide sequence.

[0293] In certain embodiments, guides of the invention comprise non-naturally occurring nucleic acids and/or non-naturally occurring nucleotides and/or nucleotide analogs, and/or chemically modifications. Non-naturally occurring nucleic acids can include, for example, mixtures of naturally and non-naturally occurring nucleotides. Non-naturally occurring nucleotides and/or nucleotide analogs may be modified at the ribose, phosphate, and/or base moiety. In an embodiment of the invention, a guide nucleic acid comprises ribonucleotides and non-ribonucleotides. In one such embodiment, a guide comprises one or more ribonucleotides and one or more deoxyribonucleotides. In an embodiment of the invention, the guide comprises one or more non-naturally occurring nucleotide or nucleotide analog such as a nucleotide with phosphorothioate linkage, boranophosphate linkage, a locked nucleic acid (LNA) nucleotides comprising a methylene bridge between the 2′ and 4′ carbons of the ribose ring, peptide nucleic acids (PNA), or bridged nucleic acids (BNA). Other examples of modified nucleotides include 2′-O-methyl analogs, 2′-deoxy analogs, 2-thiouridine analogs, N6-methyladenosine analogs, or 2′-fluoro analogs. Further examples of modified nucleotides include linkage of chemical moieties at the 2′ position, including but not limited to peptides, nuclear localization sequence (NLS), peptide nucleic acid (PNA), polyethylene glycol (PEG), triethylene glycol, or tetraethyleneglycol (TEG). Further examples of modified bases include, but are not limited to, 2-aminopurine, 5-bromo-uridine, pseudouridine (Ψ), N¹-methylpseudouridine (me¹Ψ), 5-methoxyuridine(5moU), inosine, 7-methylguanosine. Examples of guide RNA chemical modifications include, without limitation, incorporation of 2′-O-methyl (M), 2′-O-methyl-3′-phosphorothioate (MS), phosphorothioate (PS), 5-constrained ethyl(cEt), 2′-O-methyl-3′-thioPACE (MSP), or 2′-O-methyl-3′-phosphonoacetate (MP) at one or more terminal nucleotides. Such chemically modified guides can comprise increased stability and increased activity as compared to unmodified guides, though on-target vs. off-target specificity is not predictable. (See, Hendel, 2015, Nat Biotechnol. 33(9):985-9, doi: 10.1038/nbt.3290, published online 29 Jun. 2015; Ragdarm et al., 0215, PNAS, E7110-E7111; Allerson et al., J. Med. Chem. 2005, 48:901-904; Bramsen et al., Front. Genet., 2012, 3:154; Deng et al., PNAS, 2015, 112:11870-11875; Sharma et al., Med Chem Comm., 2014, 5:1454-1471; Hendel et al., Nat. Biotechnol. (2015) 33(9): 985-989; Li et al., Nature Biomedical Engineering, 2017, 1, 0066 DOI:10.1038/s41551-017-0066; Ryan et al., Nucleic Acids Res. (2018) 46(2): 792-803). In some embodiments, the 5′ and/or 3′ end of a guide RNA is modified by a variety of functional moieties including fluorescent dyes, polyethylene glycol, cholesterol, proteins, or detection tags. (See Kelly et al., 2016, J. Biotech. 233:74-83). In certain embodiments, a guide comprises ribonucleotides in a region that binds to a target DNA and one or more deoxyribonucleotides and/or nucleotide analogs in a region that binds to Cas9, Cpf1, or C2c1. In an embodiment of the invention, deoxyribonucleotides and/or nucleotide analogs are incorporated in engineered guide structures, such as, without limitation, 5′ and/or 3′ end, stem-loop regions, and the seed region. In certain embodiments, the modification is not in the 5′-handle of the stem-loop regions. Chemical modification in the 5′-handle of the stem-loop region of a guide may abolish its function (see Li, et al., Nature Biomedical Engineering, 2017, 1:0066). In certain embodiments, at least 1, 2, 3, 4, 5, 6, 7, 8, 9, 10, 11, 12, 13, 14, 15, 16, 17, 18, 19, 20, 21, 22, 23, 24, 25, 26, 27, 28, 29, 30, 35, 40, 45, 50, or 75 nucleotides of a guide is chemically modified. In some embodiments, 3-5 nucleotides at either the 3′ or the 5′ end of a guide is chemically modified. In some embodiments, only minor modifications are introduced in the seed region, such as 2′-F modifications. In some embodiments, 2′-F modification is introduced at the 3′ end of a guide. In certain embodiments, three to five nucleotides at the 5′ and/or the 3′ end of the guide are chemically modified with 2′-O-methyl (M), 2′-O-methyl-3′-phosphorothioate (MS), S-constrained ethyl(cEt), 2′-O-methyl-3′-thioPACE (MSP), or 2′-O-methyl-3′-phosphonoacetate (MP). Such modification can enhance genome editing efficiency (see Hendel et al., Nat. Biotechnol. (2015) 33(9): 985-989; Ryan et al., Nucleic Acids Res. (2018) 46(2): 792-803). In certain embodiments, all of the phosphodiester bonds of a guide are substituted with phosphorothioates (PS) for enhancing levels of gene disruption. In certain embodiments, more than five nucleotides at the 5′ and/or the 3′ end of the guide are chemically modified with 2′-O-Me, 2′-F or S-constrained ethyl(cEt). Such chemically modified guide can mediate enhanced levels of gene disruption (see Ragdarm et al., 0215, PNAS, E7110-E7111). In an embodiment of the invention, a guide is modified to comprise a chemical moiety at its 3′ and/or 5′ end. Such moieties include, but are not limited to amine, azide, alkyne, thio, dibenzocyclooctyne (DBCO), Rhodamine, peptides, nuclear localization sequence (NLS), peptide nucleic acid (PNA), polyethylene glycol (PEG), triethylene glycol, or tetraethyleneglycol (TEG). In certain embodiment, the chemical moiety is conjugated to the guide by a linker, such as an alkyl chain. In certain embodiments, the chemical moiety of the modified guide can be used to attach the guide to another molecule, such as DNA, RNA, protein, or nanoparticles. Such chemically modified guide can be used to identify or enrich cells generically edited by a CRISPR system (see Lee et al., eLife, 2017, 6:e25312, DOI:10.7554). In some embodiments, 3 nucleotides at each of the 3′ and 5′ ends are chemically modified. In a specific embodiment, the modifications comprise 2′-O-methyl or phosphorothioate analogs. In a specific embodiment, 12 nucleotides in the tetraloop and 16 nucleotides in the stem-loop region are replaced with 2′-O-methyl analogs. Such chemical modifications improve in vivo editing and stability (see Finn et al., Cell Reports (2018), 22: 2227-2235). In some embodiments, more than 60 or 70 nucleotides of the guide are chemically modified. In some embodiments, this modification comprises replacement of nucleotides with 2′-O-methyl or 2′-fluoro nucleotide analogs or phosphorothioate (PS) modification of phosphodiester bonds. In some embodiments, the chemical modification comprises 2′-O-methyl or 2′-fluoro modification of guide nucleotides extending outside of the nuclease protein when the CRISPR complex is formed or PS modification of 20 to 30 or more nucleotides of the 3′-terminus of the guide. In a particular embodiment, the chemical modification further comprises 2′-O-methyl analogs at the 5′ end of the guide or 2′-fluoro analogs in the seed and tail regions. Such chemical modifications improve stability to nuclease degradation and maintain or enhance genome-editing activity or efficiency, but modification of all nucleotides may abolish the function of the guide (see Yin et al., Nat. Biotech. (2018), 35(12): 1179-1187). Such chemical modifications may be guided by knowledge of the structure of the CRISPR complex, including knowledge of the limited number of nuclease and RNA 2′-OH interactions (see Yin et al., Nat. Biotech. (2018), 35(12): 1179-1187). In some embodiments, one or more guide RNA nucleotides may be replaced with DNA nucleotides. In some embodiments, up to 2, 4, 6, 8, 10, or 12 RNA nucleotides of the 5′-end tail/seed guide region are replaced with DNA nucleotides. In certain embodiments, the majority of guide RNA nucleotides at the 3′ end are replaced with DNA nucleotides. In particular embodiments, 16 guide RNA nucleotides at the 3′ end are replaced with DNA nucleotides. In particular embodiments, 8 guide RNA nucleotides of the 5′-end tail/seed region and 16 RNA nucleotides at the 3′ end are replaced with DNA nucleotides. In particular embodiments, guide RNA nucleotides that extend outside of the nuclease protein when the CRISPR complex is formed are replaced with DNA nucleotides. Such replacement of multiple RNA nucleotides with DNA nucleotides leads to decreased off-target activity but similar on-target activity compared to an unmodified guide; however, replacement of all RNA nucleotides at the 3′ end may abolish the function of the guide (see Yin et al., Nat. Chem. Biol. (2018) 14, 311-316). Such modifications may be guided by knowledge of the structure of the CRISPR complex, including knowledge of the limited number of nuclease and RNA 2′-OH interactions (see Yin et al., Nat. Chem. Biol. (2018) 14, 311-316).

[0294] In one embodiment of the invention, the guide comprises a modified crRNA for Cpf1, having a 5′-handle and a guide segment further comprising a seed region and a 3′-terminus. In some embodiments, the modified guide can be used with a Cpf1 of any one of Acidaminococcus sp. BV3L6 Cpf1 (AsCpf1); Francisella tularensis subsp. Novicida U112 Cpf1 (FnCpf1); L. bacterium MC2017 Cpf1 (Lb3Cpf1); Butyrivibrio proteoclasticus Cpf1 (BpCpf1); Parcubacteria bacterium GWC2011 GWC2 44_17 Cpf1 (PbCpf1); Peregrinibacteria bacterium GW2011_GWA_33_10 Cpf1 (PeCpf1); Leptospira inadai Cpf1 (LiCpf1); Smithella sp. SC_K08D17 Cpf1 (SsCpf1); L. bacterium MA2020 Cpf1 (Lb2Cpf1); Porphyromonas crevioricanis Cpf1 (PcCpf1); Porphyromonas macacae Cpf1 (PmCpf1); Candidatus Methanoplasma termitum Cpf1 (CMtCpf1); Eubacterium eligens Cpf1 (EeCpf1); Moraxella bovoculi 237 Cpf1 (MbCpf1); Prevotella disiens Cpf1 (PdCpf1); or L. bacterium ND2006 Cpf1 (LbCpf1).

[0295] In some embodiments, the modification to the guide is a chemical modification, an insertion, a deletion or a split. In some embodiments, the chemical modification includes, but is not limited to, incorporation of 2′-O-methyl (M) analogs, 2′-deoxy analogs, 2-thiouridine analogs, N6-methyladenosine analogs, 2′-fluoro analogs, 2-aminopurine, 5-bromo-uridine, pseudouridine (Ψ), N¹-methylpseudouridine (me¹Ψ), 5-methoxyuridine(5moU), inosine, 7-methylguanosine, 2′-O-methyl-3′-phosphorothioate (MS), S-constrained ethyl(cEt), phosphorothioate (PS), 2′-O-methyl-3′-thioPACE (MSP), or 2′-O-methyl-3′-phosphonoacetate (MP). In some embodiments, the guide comprises one or more of phosphorothioate modifications. In certain embodiments, at least 1, 2, 3, 4, 5, 6, 7, 8, 9, 10, 11, 12, 13, 14, 15, 16, 17, 18, 19, 20, or 25 nucleotides of the guide are chemically modified. In some embodiments, all nucleotides are chemically modified. In certain embodiments, one or more nucleotides in the seed region are chemically modified. In certain embodiments, one or more nucleotides in the 3′-terminus are chemically modified. In certain embodiments, none of the nucleotides in the 5′-handle is chemically modified. In some embodiments, the chemical modification in the seed region is a minor modification, such as incorporation of a 2′-fluoro analog. In a specific embodiment, one nucleotide of the seed region is replaced with a 2′-fluoro analog. In some embodiments, 5 or 10 nucleotides in the 3′-terminus are chemically modified. Such chemical modifications at the 3′-terminus of the Cpf1 CrRNA improve gene cutting efficiency (see Li, et al., Nature Biomedical Engineering, 2017, 1:0066). In a specific embodiment, 5 nucleotides in the 3′-terminus are replaced with 2′-fluoro analogues. In a specific embodiment, 10 nucleotides in the 3′-terminus are replaced with 2′-fluoro analogues. In a specific embodiment, 5 nucleotides in the 3′-terminus are replaced with 2′-O-methyl (M) analogs. In some embodiments, 3 nucleotides at each of the 3′ and 5′ ends are chemically modified. In a specific embodiment, the modifications comprise 2′-O-methyl or phosphorothioate analogs. In a specific embodiment, 12 nucleotides in the tetraloop and 16 nucleotides in the stem-loop region are replaced with 2′-O-methyl analogs. Such chemical modifications improve in vivo editing and stability (see Finn et al., Cell Reports (2018), 22: 2227-2235).

[0296] In some embodiments, the loop of the 5′-handle of the guide is modified. In some embodiments, the loop of the 5′-handle of the guide is modified to have a deletion, an insertion, a split, or chemical modifications. In certain embodiments, the loop comprises 3, 4, or 5 nucleotides. In certain embodiments, the loop comprises the sequence of UCUU, UUUU, UAUU, or UGUU. In some embodiments, the guide molecule forms a stemloop with a separate non-covalently linked sequence, which can be DNA or RNA.

### Synthetically Linked Guide

[0297] In one embodiment, the guide comprises a tracr sequence and a tracr mate sequence that are chemically linked or conjugated via a non-phosphodiester bond. In one embodiment, the guide comprises a tracr sequence and a tracr mate sequence that are chemically linked or conjugated via a non-nucleotide loop. In some embodiments, the tracr and tracr mate sequences are joined via a non-phosphodiester covalent linker. Examples of the covalent linker include but are not limited to a chemical moiety selected from the group consisting of carbamates, ethers, esters, amides, imines, amidines, aminotrizines, hydrozone, disulfides, thioethers, thioesters, phosphorothioates, phosphorodithioates, sulfonamides, sulfonates, fulfones, sulfoxides, ureas, thioureas, hydrazide, oxime, triazole, photolabile linkages, C—C bond forming groups such as Diels-Alder cyclo-addition pairs or ring-closing metathesis pairs, and Michael reaction pairs.

[0298] In some embodiments, the tracr and tracr mate sequences are first synthesized using the standard phosphoramidite synthetic protocol (Herdewijn, P., ed., Methods in Molecular Biology Col 288, Oligonucleotide Synthesis: Methods and Applications, Humana Press, New Jersey (2012)). In some embodiments, the tracr or tracr mate sequences can be functionalized to contain an appropriate functional group for ligation using the standard protocol known in the art (Hermanson, G. T., Bioconjugate Techniques, Academic Press (2013)). Examples of functional groups include, but are not limited to, hydroxyl, amine, carboxylic acid, carboxylic acid halide, carboxylic acid active ester, aldehyde, carbonyl, chlorocarbonyl, imidazolylcarbonyl, hydrozide, semicarbazide, thio semicarbazide, thiol, maleimide, haloalkyl, sulfonyl, ally, propargyl, diene, alkyne, and azide. Once the tracr and the tracr mate sequences are functionalized, a covalent chemical bond or linkage can be formed between the two oligonucleotides. Examples of chemical bonds include, but are not limited to, those based on carbamates, ethers, esters, amides, imines, amidines, aminotrizines, hydrozone, disulfides, thioethers, thioesters, phosphorothioates, phosphorodithioates, sulfonamides, sulfonates, fulfones, sulfoxides, ureas, thioureas, hydrazide, oxime, triazole, photolabile linkages, C—C bond forming groups such as Diels-Alder cyclo-addition pairs or ring-closing metathesis pairs, and Michael reaction pairs.

[0299] In some embodiments, the tracr and tracr mate sequences can be chemically synthesized. In some embodiments, the chemical synthesis uses automated, solid-phase oligonucleotide synthesis machines with 2′-acetoxyethyl orthoester (2′-ACE) (Scaringe et al., J. Am. Chem. Soc. (1998) 120: 11820-11821; Scaringe, Methods Enzymol. (2000) 317: 3-18) or 2′-thionocarbamate (2′-TC) chemistry (Dellinger et al., J. Am. Chem. Soc. (2011) 133: 11540-11546; Hendel et al., Nat. Biotechnol. (2015) 33:985-989).

[0300] In some embodiments, the tracr and tracr mate sequences can be covalently linked using various bioconjugation reactions, loops, bridges, and non-nucleotide links via modifications of sugar, internucleotide phosphodiester bonds, purine and pyrimidine residues. Sletten et al., Angew. Chem. Int. Ed. (2009) 48:6974-6998; Manoharan, M. Curr. Opin. Chem. Biol. (2004) 8: 570-9; Behlke et al., Oligonucleotides (2008) 18: 305-19; Watts, et al., Drug. Discov. Today (2008) 13: 842-55; Shukla, et al., Chem Med Chem (2010) 5: 328-49.

[0301] In some embodiments, the tracr and tracr mate sequences can be covalently linked using click chemistry. In some embodiments, the tracr and tracr mate sequences can be covalently linked using a triazole linker. In some embodiments, the tracr and tracr mate sequences can be covalently linked using Huisgen 1,3-dipolar cycloaddition reaction involving an alkyne and azide to yield a highly stable triazole linker (He et al., Chem Bio Chem (2015) 17: 1809-1812; WO 2016/186745). In some embodiments, the tracr and tracr mate sequences are covalently linked by ligating a 5′-hexyne tracrRNA and a 3′-azide crRNA. In some embodiments, either or both of the 5′-hexyne tracrRNA and a 3′-azide crRNA can be protected with 2′-acetoxyethl orthoester (2′-ACE) group, which can be subsequently removed using Dharmacon protocol (Scaringe et al., J. Am. Chem. Soc. (1998) 120: 11820-11821; Scaringe, Methods Enzymol. (2000) 317: 3-18).

[0302] In some embodiments, the tracr and tracr mate sequences can be covalently linked via a linker (e.g., a non-nucleotide loop) that comprises a moiety such as spacers, attachments, bioconjugates, chromophores, reporter groups, dye labeled RNAs, and non-naturally occurring nucleotide analogues. More specifically, suitable spacers for purposes of this invention include, but are not limited to, polyethers (e.g., polyethylene glycols, polyalcohols, polypropylene glycol or mixtures of ethylene and propylene glycols), polyamines group (e.g., spennine, spermidine and polymeric derivatives thereof), polyesters (e.g., poly(ethyl acrylate)), polyphosphodiesters, alkylenes, and combinations thereof. Suitable attachments include any moiety that can be added to the linker to add additional properties to the linker, such as but not limited to, fluorescent labels. Suitable bioconjugates include, but are not limited to, peptides, glycosides, lipids, cholesterol, phospholipids, diacyl glycerols and dialkyl glycerols, fatty acids, hydrocarbons, enzyme substrates, steroids, biotin, digoxigenin, carbohydrates, polysaccharides. Suitable chromophores, reporter groups, and dye-labeled RNAs include, but are not limited to, fluorescent dyes such as fluorescein and rhodamine, chemiluminescent, electrochemiluminescent, and bioluminescent marker compounds. The design of example linkers conjugating two RNA components are also described in International Patent Publication No. WO 2004/015075.

[0303] The linker (e.g., a non-nucleotide loop) can be of any length. In some embodiments, the linker has a length equivalent to about 0-16 nucleotides. In some embodiments, the linker has a length equivalent to about 0-8 nucleotides. In some embodiments, the linker has a length equivalent to about 0-4 nucleotides. In some embodiments, the linker has a length equivalent to about 2 nucleotides. Example linker design is also described in International Patent Publication No. WO2011/008730.

[0304] A typical Type II Cas9 sgRNA comprises (in 5′ to 3′ direction): a guide sequence, a poly U tract, a first complimentary stretch (the “repeat”), a loop (tetraloop), a second complimentary stretch (the “anti-repeat” being complimentary to the repeat), a stem, and further stem loops and stems and a poly A (often poly U in RNA) tail (terminator). In preferred embodiments, certain embodiments of guide architecture are retained, certain embodiment of guide architecture cam be modified, for example by addition, subtraction, or substitution of features, whereas certain other embodiments of guide architecture are maintained. Preferred locations for engineered sgRNA modifications, including but not limited to insertions, deletions, and substitutions include guide termini and regions of the sgRNA that are exposed when complexed with CRISPR protein and/or target, for example the tetraloop and/or loop2.

[0305] In certain embodiments, guides of the invention comprise specific binding sites (e.g. aptamers) for adapter proteins, which may comprise one or more functional domains (e.g. via fusion protein). When such a guides forms a CRISPR complex (i.e. CRISPR enzyme binding to guide and target) the adapter proteins bind and the functional domain associated with the adapter protein is positioned in a spatial orientation which is advantageous for the attributed function to be effective. For example, if the functional domain is a transcription activator (e.g. VP64 or p65), the transcription activator is placed in a spatial orientation which allows it to affect the transcription of the target. Likewise, a transcription repressor will be advantageously positioned to affect the transcription of the target and a nuclease (e.g. Fokl) will be advantageously positioned to cleave or partially cleave the target.

[0306] The skilled person will understand that modifications to the guide which allow for binding of the adapter+functional domain but not proper positioning of the adapter+functional domain (e.g. due to steric hindrance within the three-dimensional structure of the CRISPR complex) are modifications which are not intended. The one or more modified guide may be modified at the tetra loop, the stem loop 1, stem loop 2, or stem loop 3, as described herein, preferably at either the tetra loop or stem loop 2, and most preferably at both the tetra loop and stem loop 2.

[0307] The repeat:anti repeat duplex will be apparent from the secondary structure of the sgRNA. It may be typically a first complimentary stretch after (in 5′ to 3′ direction) the poly U tract and before the tetraloop; and a second complimentary stretch after (in 5′ to 3′ direction) the tetraloop and before the poly A tract. The first complimentary stretch (the “repeat”) is complimentary to the second complimentary stretch (the “anti-repeat”). As such, they Watson-Crick base pair to form a duplex of dsRNA when folded back on one another. As such, the anti-repeat sequence is the complimentary sequence of the repeat and in terms to A-U or C-G base pairing, but also in terms of the fact that the anti-repeat is in the reverse orientation due to the tetraloop.

[0308] In an embodiment of the invention, modification of guide architecture comprises replacing bases in stemloop 2. For example, in some embodiments, “actt” (“acuu” in RNA) and “aagt” (“aagu” in RNA) bases in stemloop2 are replaced with “cgcc” and “gcgg”. In some embodiments, “actt” and “aagt” bases in stemloop2 are replaced with complimentary GC-rich regions of 4 nucleotides. In some embodiments, the complimentary GC-rich regions of 4 nucleotides are “cgcc” and “gcgg” (both in 5′ to 3′ direction). In some embodiments, the complimentary GC-rich regions of 4 nucleotides are “gcgg” and “cgcc” (both in 5′ to 3′ direction). Other combination of C and G in the complimentary GC-rich regions of 4 nucleotides will be apparent including CCCC and GGGG.

[0309] In one embodiment, the stemloop 2, e.g., “ACTTgtttAAGT” (SEQ ID NO: 51) can be replaced by any “XXXXgtttYYYY” (SEQ ID NO: 52), e.g., where XXXX and YYYY represent any complementary sets of nucleotides that together will base pair to each other to create a stem.

[0310] In one embodiment, the stem comprises at least about 4 bp comprising complementary X and Y sequences, although stems of more, e.g., 5, 6, 7, 8, 9, 10, 11 or 12 or fewer, e.g., 3, 2, base pairs are also contemplated. Thus, for example X2-12 and Y2_12 (wherein X and Y represent any complementary set of nucleotides) may be contemplated. In one embodiment, the stem made of the X and Y nucleotides, together with the “gttt,” will form a complete hairpin in the overall secondary structure, and the amount of base pairs can be any amount that forms a complete hairpin. In one embodiment, any complementary X:Y base-pairing sequence (e.g., as to length) is tolerated, so long as the secondary structure of the entire sgRNA is preserved. In one embodiment, the stem can be a form of X:Y base-pairing that does not disrupt the secondary structure of the whole sgRNA in that it has a DR:tracr duplex, and 3 stemloops. In one embodiment, the “gttt” tetraloop that connects ACTT and AAGT (or any alternative stem made of X:Y base pairs) can be any sequence of the same length (e.g., 4 base pair) or longer that does not interrupt the overall secondary structure of the sgRNA. In one embodiment, the stemloop can be something that further lengthens stemloop2, e.g. can be MS2 aptamer. In one embodiment, the stemloop3 “GGCACCGagtCGGTGC” (SEQ ID NO: 53) can likewise take on a “agtYYYYYYY” (SEQ ID NO: 54) form, e.g., wherein X7 and Y7 represent any complementary sets of nucleotides that together will base pair to each other to create a stem. In one embodiment, the stem comprises about 7 bp comprising complementary X and Y sequences, although stems of more or fewer base pairs are also contemplated. In one embodiment, the stem made of the X and Y nucleotides, together with the “agt”, will form a complete hairpin in the overall secondary structure. In one embodiment, any complementary X:Y base pairing sequence is tolerated, so long as the secondary structure of the entire sgRNA is preserved. In one embodiment, the stem can be a form of X:Y basepairing that doesn't disrupt the secondary structure of the whole sgRNA in that it has a DR:tracr duplex, and 3 stemloops. In one embodiment, the “agt” sequence of the stemloop 3 can be extended or be replaced by an aptamer, e.g., a MS2 aptamer or sequence that otherwise generally preserves the architecture of stemloop3. In one embodiment for alternative Stemloops 2 and/or 3, each X and Y pair can refer to any base pair. In one embodiment, non-Watson Crick base pairing is contemplated, where such pairing otherwise generally preserves the architecture of the stemloop at that position.

[0311] In one embodiment, the DR:tracrRNA duplex can be replaced with the form: gYYYYag(N)NNNNxxxxNNNN(AAN)uuRRRRu (SEQ ID NO: 55) (using standard IUPAC nomenclature for nucleotides), wherein (N) and (AAN) represent part of the bulge in the duplex, and “xxxx” represents a linker sequence. NNNN on the direct repeat can be anything so long as it base-pairs with the corresponding NNNN portion of the tracrRNA. In one embodiment, the DR:tracrRNA duplex can be connected by a linker of any length (xxxx . . . ), any base composition, as long as it doesn't alter the overall structure.

[0312] In one embodiment, the sgRNA structural requirement is to have a duplex and 3 stemloops. In most embodiments, the actual sequence requirement for many of the particular base requirements are lax, in that the architecture of the DR:tracrRNA duplex should be preserved, but the sequence that creates the architecture, i.e., the stems, loops, bulges, etc., may be altered.

### Aptamers

[0313] One guide with a first aptamer/RNA-binding protein pair can be linked or fused to an activator, whilst a second guide with a second aptamer/RNA-binding protein pair can be linked or fused to a repressor. The guides are for different targets (loci), so this allows one gene to be activated and one repressed. For example, the following schematic shows such an approach:

[0314] Guide 1—MS2-------aptamer MS2 RNA-binding protein-------VP64 activator; and

[0315] Guide 2—PP7 aptamer-------PP7 RNA-binding protein-------SID4x repressor.

[0316] The present invention also relates to orthogonal PP7/MS2 gene targeting. In this example, sgRNA targeting different loci are modified with distinct RNA loops in order to recruit MS2-VP64 or PP7-SID4X, which activate and repress their target loci, respectively. PP7 is the RNA-binding coat protein of the bacteriophage Pseudomonas. Like MS2, it binds a specific RNA sequence and secondary structure. The PP7 RNA-recognition motif is distinct from that of MS2. Consequently, PP7 and MS2 can be multiplexed to mediate distinct effects at different genomic loci simultaneously. For example, an sgRNA targeting locus A can be modified with MS2 loops, recruiting MS2-VP64 activators, while another sgRNA targeting locus B can be modified with PP7 loops, recruiting PP7-SID4X repressor domains. In the same cell, dCas9 can thus mediate orthogonal, locus-specific modifications. This principle can be extended to incorporate other orthogonal RNA-binding proteins such as Q-beta.

[0317] An alternative option for orthogonal repression includes incorporating non-coding RNA loops with transactive repressive function into the guide (either at similar positions to the MS2/PP7 loops integrated into the guide or at the 3′ terminus of the guide). For instance, guides were designed with non-coding (but known to be repressive) RNA loops (e.g. using the Alu repressor (in RNA) that interferes with RNA polymerase II in mammalian cells). The Alu RNA sequence was located: in place of the MS2 RNA sequences as used herein (e.g. at tetraloop and/or stem loop 2); and/or at 3′ terminus of the guide. This gives possible combinations of MS2, PP7 or Alu at the tetraloop and/or stemloop 2 positions, as well as, optionally, addition of Alu at the 3′ end of the guide (with or without a linker).

[0318] The use of two different aptamers (distinct RNA) allows an activator-adaptor protein fusion and a repressor-adaptor protein fusion to be used, with different guides, to activate expression of one gene, whilst repressing another. They, along with their different guides can be administered together, or substantially together, in a multiplexed approach. A large number of such modified guides can be used all at the same time, for example 10 or 20 or 30 and so forth, whilst only one (or at least a minimal number) of Cas9s to be delivered, as a comparatively small number of Cas9s can be used with a large number modified guides. The adaptor protein may be associated (preferably linked or fused to) one or more activators or one or more repressors. For example, the adaptor protein may be associated with a first activator and a second activator. The first and second activators may be the same, but they are preferably different activators. For example, one might be VP64, whilst the other might be p65, although these are just examples and other transcriptional activators are envisaged. Three or more or even four or more activators (or repressors) may be used, but package size may limit the number being higher than 5 different functional domains. Linkers are preferably used, over a direct fusion to the adaptor protein, where two or more functional domains are associated with the adaptor protein. Suitable linkers might include the GlySer linker.

[0319] It is also envisaged that the enzyme-guide complex as a whole may be associated with two or more functional domains. For example, there may be two or more functional domains associated with the enzyme, or there may be two or more functional domains associated with the guide (via one or more adaptor proteins), or there may be one or more functional domains associated with the enzyme and one or more functional domains associated with the guide (via one or more adaptor proteins).

[0320] The fusion between the adaptor protein and the activator or repressor may include a linker. For example, GlySer linkers GGGS can be used. They can be used in repeats of 3 ((GGGGS)₃) (SEQ ID NO: 56) or 6 (SEQ ID NO: 57), 9 (SEQ ID NO: 58) or even 12 (SEQ ID NO: 59) or more, to provide suitable lengths, as required. Linkers can be used between the RNA-binding protein and the functional domain (activator or repressor), or between the CRISPR Enzyme (Cas9) and the functional domain (activator or repressor). The linkers the user to engineer appropriate amounts of “mechanical flexibility”.

### Dead Guides

[0321] In one embodiment, the invention provides guide sequences which are modified in a manner which allows for formation of the CRISPR complex and successful binding to the target, while at the same time, not allowing for successful nuclease activity (i.e. without nuclease activity/without indel activity). For matters of explanation such modified guide sequences are referred to as “dead guides” or “dead guide sequences”. These dead guides or dead guide sequences can be thought of as catalytically inactive or conformationally inactive with regard to nuclease activity. Nuclease activity may be measured using surveyor analysis or deep sequencing as commonly used in the art, preferably surveyor analysis. Similarly, dead guide sequences may not sufficiently engage in productive base pairing with respect to the ability to promote catalytic activity or to distinguish on-target and off-target binding activity. Briefly, the surveyor assay involves purifying and amplifying a CRISPR target site for a gene and forming heteroduplexes with primers amplifying the CRISPR target site. After re-anneal, the products are treated with SURVEYOR nuclease and SURVEYOR enhancer S (Transgenomics) following the manufacturer's recommended protocols, analyzed on gels, and quantified based upon relative band intensities.

[0322] Hence, in a related embodiment, the invention provides a non-naturally occurring or engineered composition Cas9 CRISPR-Cas system comprising a functional Cas9 as described herein, and guide RNA (gRNA) wherein the gRNA comprises a dead guide sequence whereby the gRNA is capable of hybridizing to a target sequence such that the Cas9 CRISPR-Cas system is directed to a genomic locus of interest in a cell without detectable indel activity resultant from nuclease activity of a non-mutant Cas9 enzyme of the system as detected by a SURVEYOR assay. For shorthand purposes, a gRNA comprising a dead guide sequence whereby the gRNA is capable of hybridizing to a target sequence such that the Cas9 CRISPR-Cas system is directed to a genomic locus of interest in a cell without detectable indel activity resultant from nuclease activity of a non-mutant Cas9 enzyme of the system as detected by a SURVEYOR assay is herein termed a “dead gRNA”. It is to be understood that any of the gRNAs according to the invention as described herein elsewhere may be used as dead gRNAs/gRNAs comprising a dead guide sequence as described herein below. Any of the methods, products, compositions and uses as described herein elsewhere is equally applicable with the dead gRNAs/gRNAs comprising a dead guide sequence as further detailed below. By means of further guidance, the following particular embodiments and embodiments are provided.

[0323] The ability of a dead guide sequence to direct sequence-specific binding of a CRISPR complex to a target sequence may be assessed by any suitable assay. For example, the components of a CRISPR system sufficient to form a CRISPR complex, including the dead guide sequence to be tested, may be provided to a host cell having the corresponding target sequence, such as by transfection with vectors encoding the components of the CRISPR sequence, followed by an assessment of preferential cleavage within the target sequence, such as by Surveyor assay as described herein. Similarly, cleavage of a target polynucleotide sequence may be evaluated in a test tube by providing the target sequence, components of a CRISPR complex, including the dead guide sequence to be tested and a control guide sequence different from the test dead guide sequence, and comparing binding or rate of cleavage at the target sequence between the test and control guide sequence reactions. Other assays are possible and will occur to those skilled in the art. A dead guide sequence may be selected to target any target sequence. In some embodiments, the target sequence is a sequence within a genome of a cell.

[0324] As explained further herein, several structural parameters allow for a proper framework to arrive at such dead guides. Dead guide sequences are shorter than respective guide sequences which result in active Cas9-specific indel formation. Dead guides are 5%, 10%, 20%, 30%, 40%, 50%, shorter than respective guides directed to the same Cas9 leading to active Cas9-specific indel formation.

[0325] As explained below and known in the art, one embodiment of gRNA—Cas9 specificity is the direct repeat sequence, which is to be appropriately linked to such guides. In particular, this implies that the direct repeat sequences are designed dependent on the origin of the Cas9. Thus, structural data available for validated dead guide sequences may be used for designing Cas9 specific equivalents. Structural similarity between, e.g., the orthologous nuclease domains RuvC of two or more Cas9 effector proteins may be used to transfer design equivalent dead guides. Thus, the dead guide herein may be appropriately modified in length and sequence to reflect such Cas9 specific equivalents, allowing for formation of the CRISPR complex and successful binding to the target, while at the same time, not allowing for successful nuclease activity.

[0326] The use of dead guides in the context herein as well as the state of the art provides a surprising and unexpected platform for network biology and/or systems biology in both in vitro, ex vivo, and in vivo applications, allowing for multiplex gene targeting, and in particular bidirectional multiplex gene targeting. Prior to the use of dead guides, addressing multiple targets, for example for activation, repression and/or silencing of gene activity, has been challenging and in some cases not possible. With the use of dead guides, multiple targets, and thus multiple activities, may be addressed, for example, in the same cell, in the same animal, or in the same patient. Such multiplexing may occur at the same time or staggered for a desired timeframe.

[0327] For example, the dead guides now allow for the first time to use gRNA as a means for gene targeting, without the consequence of nuclease activity, while at the same time providing directed means for activation or repression. Guide RNA comprising a dead guide may be modified to further include elements in a manner which allow for activation or repression of gene activity, in particular protein adaptors (e.g. aptamers) as described herein elsewhere allowing for functional placement of gene effectors (e.g. activators or repressors of gene activity). One example is the incorporation of aptamers, as explained herein and in the state of the art. By engineering the gRNA comprising a dead guide to incorporate protein-interacting aptamers (Konermann et al., “Genome-scale transcription activation by an engineered CRISPR-Cas9 complex,” doi:10.1038/nature14136, incorporated herein by reference), one may assemble a synthetic transcription activation complex consisting of multiple distinct effector domains. Such may be modeled after natural transcription activation processes. For example, an aptamer, which selectively binds an effector (e.g. an activator or repressor; dimerized MS2 bacteriophage coat proteins as fusion proteins with an activator or repressor), or a protein which itself binds an effector (e.g. activator or repressor) may be appended to a dead gRNA tetraloop and/or a stem-loop 2. In the case of MS2, the fusion protein MS2-VP64 binds to the tetraloop and/or stem-loop 2 and in turn mediates transcriptional up-regulation, for example for Neurog2. Other transcriptional activators are, for example, VP64. P65, HSF1, and MyoDl. By mere example of this concept, replacement of the MS2 stem-loops with PP7-interacting stem-loops may be used to recruit repressive elements.

[0328] Thus, one embodiment is a gRNA of the invention which comprises a dead guide, wherein the gRNA further comprises modifications which provide for gene activation or repression, as described herein. The dead gRNA may comprise one or more aptamers. The aptamers may be specific to gene effectors, gene activators or gene repressors. Alternatively, the aptamers may be specific to a protein which in turn is specific to and recruits/binds a specific gene effector, gene activator or gene repressor. If there are multiple sites for activator or repressor recruitment, it is preferred that the sites are specific to either activators or repressors. If there are multiple sites for activator or repressor binding, the sites may be specific to the same activators or same repressors. The sites may also be specific to different activators or different repressors. The gene effectors, gene activators, gene repressors may be present in the form of fusion proteins.

[0329] In an embodiment, the dead gRNA as described herein or the Cas9 CRISPR-Cas complex as described herein includes a non-naturally occurring or engineered composition comprising two or more adaptor proteins, wherein each protein is associated with one or more functional domains and wherein the adaptor protein binds to the distinct RNA sequence(s) inserted into the at least one loop of the dead gRNA.

[0330] Hence, an embodiment provides a non-naturally occurring or engineered composition comprising a guide RNA (gRNA) comprising a dead guide sequence capable of hybridizing to a target sequence in a genomic locus of interest in a cell, wherein the dead guide sequence is as defined herein, a Cas9 comprising at least one or more nuclear localization sequences, wherein the Cas9 optionally comprises at least one mutation wherein at least one loop of the dead gRNA is modified by the insertion of distinct RNA sequence(s) that bind to one or more adaptor proteins, and wherein the adaptor protein is associated with one or more functional domains; or, wherein the dead gRNA is modified to have at least one non-coding functional loop, and wherein the composition comprises two or more adaptor proteins, wherein the each protein is associated with one or more functional domains.

[0331] In certain embodiments, the adaptor protein is a fusion protein comprising the functional domain, the fusion protein optionally comprising a linker between the adaptor protein and the functional domain, the linker optionally including a GlySer linker.

[0332] In certain embodiments, the at least one loop of the dead gRNA is not modified by the insertion of distinct RNA sequence(s) that bind to the two or more adaptor proteins.

[0333] In certain embodiments, the one or more functional domains associated with the adaptor protein is a transcriptional activation domain.

[0334] In certain embodiments, the one or more functional domains associated with the adaptor protein is a transcriptional activation domain comprising VP64, p65, MyoD1, HSF1, RTA or SETT/9.

[0335] In certain embodiments, the one or more functional domains associated with the adaptor protein is a transcriptional repressor domain.

[0336] In certain embodiments, the transcriptional repressor domain is a KRAB domain.

[0337] In certain embodiments, the transcriptional repressor domain is a NuE domain, NcoR domain, SID domain or a SID4X domain.

[0338] In certain embodiments, at least one of the one or more functional domains associated with the adaptor protein have one or more activities comprising methylase activity, demethylase activity, transcription activation activity, transcription repression activity, transcription release factor activity, histone modification activity, DNA integration activity RNA cleavage activity, DNA cleavage activity or nucleic acid binding activity.

[0339] In certain embodiments, the DNA cleavage activity is due to a Fok1 nuclease.

[0340] In certain embodiments, the dead gRNA is modified so that, after dead gRNA binds the adaptor protein and further binds to the Cas9 and target, the functional domain is in a spatial orientation allowing for the functional domain to function in its attributed function.

[0341] In certain embodiments, the at least one loop of the dead gRNA is tetra loop and/or loop2. In certain embodiments, the tetra loop and loop 2 of the dead gRNA are modified by the insertion of the distinct RNA sequence(s).

[0342] In certain embodiments, the insertion of distinct RNA sequence(s) that bind to one or more adaptor proteins is an aptamer sequence. In certain embodiments, the aptamer sequence is two or more aptamer sequences specific to the same adaptor protein. In certain embodiments, the aptamer sequence is two or more aptamer sequences specific to different adaptor protein.

[0343] In certain embodiments, the adaptor protein comprises MS2, PP7, Q13, F2, GA, fr, JP501, M12, R17, BZ13, JP34, JP500, KU1, M11, MX1, TW18, VK, SP, FI, ID2, NL95, TW19, AP205, ϕCb5, ϕCb8r, ϕCb12r, ϕCb23r, 7s, PRR1.

[0344] In certain embodiments, the cell is a eukaryotic cell. In certain embodiments, the eukaryotic cell is a mammalian cell, optionally a mouse cell. In certain embodiments, the mammalian cell is a human cell.

[0345] In certain embodiments, a first adaptor protein is associated with a p65 domain and a second adaptor protein is associated with a HSF1 domain.

[0346] In certain embodiments, the composition comprises a Cas9 CRISPR-Cas complex having at least three functional domains, at least one of which is associated with the Cas9 and at least two of which are associated with dead gRNA.

[0347] In certain embodiments, the composition further comprises a second gRNA, wherein the second gRNA is a live gRNA capable of hybridizing to a second target sequence such that a second Cas9 CRISPR-Cas system is directed to a second genomic locus of interest in a cell with detectable indel activity at the second genomic locus resultant from nuclease activity of the Cas9 enzyme of the system.

[0348] In certain embodiments, the composition further comprises a plurality of dead gRNAs and/or a plurality of live gRNAs.

[0349] One embodiment of the invention is to take advantage of the modularity and customizability of the gRNA scaffold to establish a series of gRNA scaffolds with different binding sites (in particular aptamers) for recruiting distinct types of effectors in an orthogonal manner. Again, for matters of example and illustration of the broader concept, replacement of the MS2 stem-loops with PP7-interacting stem-loops may be used to bind/recruit repressive elements, enabling multiplexed bidirectional transcriptional control. Thus, in general, gRNA comprising a dead guide may be employed to provide for multiplex transcriptional control and preferred bidirectional transcriptional control. This transcriptional control is most preferred of genes. For example, one or more gRNA comprising dead guide(s) may be employed in targeting the activation of one or more target genes. At the same time, one or more gRNA comprising dead guide(s) may be employed in targeting the repression of one or more target genes. Such a sequence may be applied in a variety of different combinations, for example the target genes are first repressed and then at an appropriate period other targets are activated, or select genes are repressed at the same time as select genes are activated, followed by further activation and/or repression. As a result, multiple components of one or more biological systems may advantageously be addressed together.

[0350] In an embodiment, the invention provides nucleic acid molecule(s) encoding dead gRNA or the Cas9 CRISPR-Cas complex or the composition as described herein.

[0351] In an embodiment, the invention provides a vector system comprising a nucleic acid molecule encoding dead guide RNA as defined herein. In certain embodiments, the vector system further comprises a nucleic acid molecule(s) encoding Cas9. In certain embodiments, the vector system further comprises a nucleic acid molecule(s) encoding (live) gRNA. In certain embodiments, the nucleic acid molecule or the vector further comprises regulatory element(s) operable in a eukaryotic cell operably linked to the nucleic acid molecule encoding the guide sequence (gRNA) and/or the nucleic acid molecule encoding Cas9 and/or the optional nuclear localization sequence(s).

[0352] In another embodiment, structural analysis may also be used to study interactions between the dead guide and the active Cas9 nuclease that enable DNA binding, but no DNA cutting. In this way amino acids important for nuclease activity of Cas9 are determined. Modification of such amino acids allows for improved Cas9 enzymes used for gene editing.

[0353] A further embodiment is combining the use of dead guides as explained herein with other applications of CRISPR, as explained herein as well as known in the art. For example, gRNA comprising dead guide(s) for targeted multiplex gene activation or repression or targeted multiplex bidirectional gene activation/repression may be combined with gRNA comprising guides which maintain nuclease activity, as explained herein. Such gRNA comprising guides which maintain nuclease activity may or may not further include modifications which allow for repression of gene activity (e.g. aptamers). Such gRNA comprising guides which maintain nuclease activity may or may not further include modifications which allow for activation of gene activity (e.g. aptamers). In such a manner, a further means for multiplex gene control is introduced (e.g. multiplex gene targeted activation without nuclease activity/without indel activity may be provided at the same time or in combination with gene targeted repression with nuclease activity).

[0354] For example, 1) using one or more gRNA (e.g. 1-50, 1-40, 1-30, 1-20, preferably 1-10, more preferably 1-5) comprising dead guide(s) targeted to one or more genes and further modified with appropriate aptamers for the recruitment of gene activators; 2) may be combined with one or more gRNA (e.g. 1-50, 1-40, 1-30, 1-20, preferably 1-10, more preferably 1-5) comprising dead guide(s) targeted to one or more genes and further modified with appropriate aptamers for the recruitment of gene repressors. 1) and/or 2) may then be combined with 3) one or more gRNA (e.g. 1-50, 1-40, 1-30, 1-20, preferably 1-10, more preferably 1-5) targeted to one or more genes. This combination can then be carried out in turn with 1)+2)+3) with 4) one or more gRNA (e.g. 1-50, 1-40, 1-30, 1-20, preferably 1-10, more preferably 1-5) targeted to one or more genes and further modified with appropriate aptamers for the recruitment of gene activators. This combination can then be carried in turn with 1)+2)+3)+4) with 5) one or more gRNA (e.g. 1-50, 1-40, 1-30, 1-20, preferably 1-10, more preferably 1-5) targeted to one or more genes and further modified with appropriate aptamers for the recruitment of gene repressors. As a result various uses and combinations are included in the invention. For example, combination 1)+2); combination 1)+3); combination 2)+3); combination 1)+2)+3); combination 1)+2)+3)+4); combination 1)+3)+4); combination 2)+3)+4); combination 1)+2)+4); combination 1)+2)+3)+4)+5); combination 1)+3)+4)+5); combination 2)+3)+4)+5); combination 1)+2)+4)+5); combination 1)+2)+3)+5); combination 1)+3)+5); combination 2)+3)+5); combination 1)+2)+5).

[0355] In an embodiment, the invention provides an algorithm for designing, evaluating, or selecting a dead guide RNA targeting sequence (dead guide sequence) for guiding a Cas9 CRISPR-Cas system to a target gene locus. In particular, it has been determined that dead guide RNA specificity relates to and can be optimized by varying i) GC content and ii) targeting sequence length. In an embodiment, the invention provides an algorithm for designing or evaluating a dead guide RNA targeting sequence that minimizes off-target binding or interaction of the dead guide RNA. In an embodiment of the invention, the algorithm for selecting a dead guide RNA targeting sequence for directing a CRISPR system to a gene locus in an organism comprises a) locating one or more CRISPR motifs in the gene locus, analyzing the 20 nt sequence downstream of each CRISPR motif by i) determining the GC content of the sequence; and ii) determining whether there are off-target matches of the 15 downstream nucleotides nearest to the CRISPR motif in the genome of the organism, and c) selecting the 15 nucleotide sequence for use in a dead guide RNA if the GC content of the sequence is 70% or less and no off-target matches are identified. In an embodiment, the sequence is selected for a targeting sequence if the GC content is 60% or less. In certain embodiments, the sequence is selected for a targeting sequence if the GC content is 55% or less, 50% or less, 45% or less, 40% or less, 35% or less or 30% or less. In an embodiment, two or more sequences of the gene locus are analyzed and the sequence having the lowest GC content, or the next lowest GC content, or the next lowest GC content is selected. In an embodiment, the sequence is selected for a targeting sequence if no off-target matches are identified in the genome of the organism. In an embodiment, the targeting sequence is selected if no off-target matches are identified in regulatory sequences of the genome.

[0356] In an embodiment, the invention provides a method of selecting a dead guide RNA targeting sequence for directing a functionalized CRISPR system to a gene locus in an organism, which comprises a) locating one or more CRISPR motifs in the gene locus; b) analyzing the 20 nt sequence downstream of each CRISPR motif by: i) determining the GC content of the sequence; and ii) determining whether there are off-target matches of the first 15 nt of the sequence in the genome of the organism; c) selecting the sequence for use in a guide RNA if the GC content of the sequence is 70% or less and no off-target matches are identified. In an embodiment, the sequence is selected if the GC content is 50% or less. In an embodiment, the sequence is selected if the GC content is 40% or less. In an embodiment, the sequence is selected if the GC content is 30% or less. In an embodiment, two or more sequences are analyzed and the sequence having the lowest GC content is selected. In an embodiment, off-target matches are determined in regulatory sequences of the organism. In an embodiment, the gene locus is a regulatory region. An embodiment provides a dead guide RNA comprising the targeting sequence selected according to the aforementioned methods.

[0357] In an embodiment, the invention provides a dead guide RNA for targeting a functionalized CRISPR system to a gene locus in an organism. In an embodiment of the invention, the dead guide RNA comprises a targeting sequence wherein the CG content of the target sequence is 70% or less, and the first 15 nt of the targeting sequence does not match an off-target sequence downstream from a CRISPR motif in the regulatory sequence of another gene locus in the organism. In certain embodiments, the GC content of the targeting sequence 60% or less, 55% or less, 50% or less, 45% or less, 40% or less, 35% or less or 30% or less. In certain embodiments, the GC content of the targeting sequence is from 70% to 60% or from 60% to 50% or from 50% to 40% or from 40% to 30%. In an embodiment, the targeting sequence has the lowest CG content among potential targeting sequences of the locus.

[0358] In an embodiment of the invention, the first 15 nt of the dead guide match the target sequence. In another embodiment, first 14 nt of the dead guide match the target sequence. In another embodiment, the first 13 nt of the dead guide match the target sequence. In another embodiment first 12 nt of the dead guide match the target sequence. In another embodiment, first 11 nt of the dead guide match the target sequence. In another embodiment, the first 10 nt of the dead guide match the target sequence. In an embodiment of the invention the first 15 nt of the dead guide does not match an off-target sequence downstream from a CRISPR motif in the regulatory region of another gene locus. In other embodiments, the first 14 nt, or the first 13 nt of the dead guide, or the first 12 nt of the guide, or the first 11 nt of the dead guide, or the first 10 nt of the dead guide, does not match an off-target sequence downstream from a CRISPR motif in the regulatory region of another gene locus. In other embodiments, the first 15 nt, or 14 nt, or 13 nt, or 12 nt, or 11 nt of the dead guide do not match an off-target sequence downstream from a CRISPR motif in the genome.

[0359] In certain embodiments, the dead guide RNA includes additional nucleotides at the 3′-end that do not match the target sequence. Thus, a dead guide RNA that includes the first 15 nt, or 14 nt, or 13 nt, or 12 nt, or 11 nt downstream of a CRISPR motif can be extended in length at the 3′ end to 12 nt, 13 nt, 14 nt, 15 nt, 16 nt, 17 nt, 18 nt, 19 nt, 20 nt, or longer.

[0360] The invention provides a method for directing a Cas9 CRISPR-Cas system, including but not limited to a dead Cas9 (dCas9) or functionalized Cas9 system (which may comprise a functionalized Cas9 or functionalized guide) to a gene locus. In an embodiment, the invention provides a method for selecting a dead guide RNA targeting sequence and directing a functionalized CRISPR system to a gene locus in an organism. In an embodiment, the invention provides a method for selecting a dead guide RNA targeting sequence and effecting gene regulation of a target gene locus by a functionalized Cas9 CRISPR-Cas system. In certain embodiments, the method is used to effect target gene regulation while minimizing off-target effects. In an embodiment, the invention provides a method for selecting two or more dead guide RNA targeting sequences and effecting gene regulation of two or more target gene loci by a functionalized Cas9 CRISPR-Cas system. In certain embodiments, the method is used to effect regulation of two or more target gene loci while minimizing off-target effects.

[0361] In an embodiment, the invention provides a method of selecting a dead guide RNA targeting sequence for directing a functionalized Cas9 to a gene locus in an organism, which comprises: a) locating one or more CRISPR motifs in the gene locus; b) analyzing the sequence downstream of each CRISPR motif by: i) selecting 10 to 15 nt adjacent to the CRISPR motif, ii) determining the GC content of the sequence; and c) selecting the 10 to 15 nt sequence as a targeting sequence for use in a guide RNA if the GC content of the sequence is 40% or more. In an embodiment, the sequence is selected if the GC content is 50% or more. In an embodiment, the sequence is selected if the GC content is 60% or more. In an embodiment, the sequence is selected if the GC content is 70% or more. In an embodiment, two or more sequences are analyzed and the sequence having the highest GC content is selected. In an embodiment, the method further comprises adding nucleotides to the 3′ end of the selected sequence which do not match the sequence downstream of the CRISPR motif An embodiment provides a dead guide RNA comprising the targeting sequence selected according to the aforementioned methods.

[0362] In an embodiment, the invention provides a dead guide RNA for directing a functionalized CRISPR system to a gene locus in an organism wherein the targeting sequence of the dead guide RNA consists of 10 to 15 nucleotides adjacent to the CRISPR motif of the gene locus, wherein the CG content of the target sequence is 50% or more. In certain embodiments, the dead guide RNA further comprises nucleotides added to the 3′ end of the targeting sequence which do not match the sequence downstream of the CRISPR motif of the gene locus.

[0363] In an embodiment, the invention provides for a single effector to be directed to one or more, or two or more gene loci. In certain embodiments, the effector is associated with a Cas9, and one or more, or two or more selected dead guide RNAs are used to direct the Cas9-associated effector to one or more, or two or more selected target gene loci. In certain embodiments, the effector is associated with one or more, or two or more selected dead guide RNAs, each selected dead guide RNA, when complexed with a Cas9 enzyme, causing its associated effector to localize to the dead guide RNA target. One non-limiting example of such CRISPR systems modulates activity of one or more, or two or more gene loci subject to regulation by the same transcription factor.

[0364] In an embodiment, the invention provides for two or more effectors to be directed to one or more gene loci. In certain embodiments, two or more dead guide RNAs are employed, each of the two or more effectors being associated with a selected dead guide RNA, with each of the two or more effectors being localized to the selected target of its dead guide RNA. One non-limiting example of such CRISPR systems modulates activity of one or more, or two or more gene loci subject to regulation by different transcription factors. Thus, in one non-limiting embodiment, two or more transcription factors are localized to different regulatory sequences of a single gene. In another non-limiting embodiment, two or more transcription factors are localized to different regulatory sequences of different genes. In certain embodiments, one transcription factor is an activator. In certain embodiments, one transcription factor is an inhibitor. In certain embodiments, one transcription factor is an activator and another transcription factor is an inhibitor. In certain embodiments, gene loci expressing different components of the same regulatory pathway are regulated. In certain embodiments, gene loci expressing components of different regulatory pathways are regulated.

[0365] In an embodiment, the invention also provides a method and algorithm for designing and selecting dead guide RNAs that are specific for target DNA cleavage or target binding and gene regulation mediated by an active Cas9 CRISPR-Cas system. In certain embodiments, the Cas9 CRISPR-Cas system provides orthogonal gene control using an active Cas9 which cleaves target DNA at one gene locus while at the same time binds to and promotes regulation of another gene locus.

[0366] In an embodiment, the invention provides an method of selecting a dead guide RNA targeting sequence for directing a functionalized Cas9 to a gene locus in an organism, without cleavage, which comprises a) locating one or more CRISPR motifs in the gene locus; b) analyzing the sequence downstream of each CRISPR motif by i) selecting 10 to 15 nt adjacent to the CRISPR motif, ii) determining the GC content of the sequence, and c) selecting the 10 to 15 nt sequence as a targeting sequence for use in a dead guide RNA if the GC content of the sequence is 30% more, 40% or more. In certain embodiments, the GC content of the targeting sequence is 35% or more, 40% or more, 45% or more, 50% or more, 55% or more, 60% or more, 65% or more, or 70% or more. In certain embodiments, the GC content of the targeting sequence is from 30% to 40% or from 40% to 50% or from 50% to 60% or from 60% to 70%. In an embodiment of the invention, two or more sequences in a gene locus are analyzed and the sequence having the highest GC content is selected.

[0367] In an embodiment of the invention, the portion of the targeting sequence in which GC content is evaluated is 10 to 15 contiguous nucleotides of the 15 target nucleotides nearest to the PAM. In an embodiment of the invention, the portion of the guide in which GC content is considered is the 10 to 11 nucleotides or 11 to 12 nucleotides or 12 to 13 nucleotides or 13, or 14, or 15 contiguous nucleotides of the 15 nucleotides nearest to the PAM.

[0368] In an embodiment, the invention further provides an algorithm for identifying dead guide RNAs which promote CRISPR system gene locus cleavage while avoiding functional activation or inhibition. It is observed that increased GC content in dead guide RNAs of 16 to 20 nucleotides coincides with increased DNA cleavage and reduced functional activation.

[0369] In some embodiments, the efficiency of functionalized Cas9 can be increased by addition of nucleotides to the 3′ end of a guide RNA which do not match a target sequence downstream of the CRISPR motif. For example, of dead guide RNA 11 to 15 nt in length, shorter guides may be less likely to promote target cleavage, but are also less efficient at promoting CRISPR system binding and functional control. In certain embodiments, addition of nucleotides that don't match the target sequence to the 3′ end of the dead guide RNA increase activation efficiency while not increasing undesired target cleavage. In an embodiment, the invention also provides a method and algorithm for identifying improved dead guide RNAs that effectively promote CRISPRP system function in DNA binding and gene regulation while not promoting DNA cleavage. Thus, in certain embodiments, the invention provides a dead guide RNA that includes the first 15 nt, or 14 nt, or 13 nt, or 12 nt, or 11 nt downstream of a CRISPR motif and is extended in length at the 3′ end by nucleotides that mismatch the target to 12 nt, 13 nt, 14 nt, 15 nt, 16 nt, 17 nt, 18 nt, 19 nt, 20 nt, or longer.

[0370] In an embodiment, the invention provides a method for effecting selective orthogonal gene control. As will be appreciated from the disclosure herein, dead guide selection according to the invention, taking into account guide length and GC content, provides effective and selective transcription control by a functional Cas9 CRISPR-Cas system, for example to regulate transcription of a gene locus by activation or inhibition and minimize off-target effects. Accordingly, by providing effective regulation of individual target loci, the invention also provides effective orthogonal regulation of two or more target loci.

[0371] In certain embodiments, orthogonal gene control is by activation or inhibition of two or more target loci. In certain embodiments, orthogonal gene control is by activation or inhibition of one or more target locus and cleavage of one or more target locus.

[0372] In one embodiment, the invention provides a cell comprising a non-naturally occurring Cas9 CRISPR-Cas system comprising one or more dead guide RNAs disclosed or made according to a method or algorithm described herein wherein the expression of one or more gene products has been altered. In an embodiment of the invention, the expression in the cell of two or more gene products has been altered. The invention also provides a cell line from such a cell.

[0373] In one embodiment, the invention provides a multicellular organism comprising one or more cells comprising a non-naturally occurring Cas9 CRISPR-Cas system comprising one or more dead guide RNAs disclosed or made according to a method or algorithm described herein. In one embodiment, the invention provides a product from a cell, cell line, or multicellular organism comprising a non-naturally occurring Cas9 CRISPR-Cas system comprising one or more dead guide RNAs disclosed or made according to a method or algorithm described herein.

[0374] A further embodiment of this invention is the use of gRNA comprising dead guide(s) as described herein, optionally in combination with gRNA comprising guide(s) as described herein or in the state of the art, in combination with systems e.g. cells, transgenic animals, transgenic mice, inducible transgenic animals, inducible transgenic mice) which are engineered for either overexpression of Cas9 or preferably knock in Cas9. As a result, a single system (e.g. transgenic animal, cell) can serve as a basis for multiplex gene modifications in systems/network biology. On account of the dead guides, this is now possible in both in vitro, ex vivo, and in vivo.

[0375] For example, once the Cas9 is provided for, one or more dead gRNAs may be provided to direct multiplex gene regulation, and preferably multiplex bidirectional gene regulation. The one or more dead gRNAs may be provided in a spatially and temporally appropriate manner if necessary or desired (for example tissue specific induction of Cas9 expression). On account that the transgenic/inducible Cas9 is provided for (e.g. expressed) in the cell, tissue, animal of interest, both gRNAs comprising dead guides or gRNAs comprising guides are equally effective. In the same manner, a further embodiment of this invention is the use of gRNA comprising dead guide(s) as described herein, optionally in combination with gRNA comprising guide(s) as described herein or in the state of the art, in combination with systems (e.g. cells, transgenic animals, transgenic mice, inducible transgenic animals, inducible transgenic mice) which are engineered for knockout Cas9 CRISPR-Cas.

[0376] As a result, the combination of dead guides as described herein with CRISPR applications described herein and CRISPR applications known in the art results in a highly efficient and accurate means for multiplex screening of systems (e.g. network biology). Such screening allows, for example, identification of specific combinations of gene activities for identifying genes responsible for diseases (e.g. on/off combinations), in particular gene related diseases. A preferred application of such screening is cancer. In the same manner, screening for treatment for such diseases is included in the invention. Cells or animals may be exposed to aberrant conditions resulting in disease or disease like effects. Candidate compositions may be provided and screened for an effect in the desired multiplex environment. For example, a patient's cancer cells may be screened for which gene combinations will cause them to die, and then use this information to establish appropriate therapies.

[0377] In one embodiment, the invention provides a kit comprising one or more of the components described herein. The kit may include dead guides as described herein with or without guides as described herein.

[0378] The structural information provided herein allows for interrogation of dead gRNA interaction with the target DNA and the Cas9 permitting engineering or alteration of dead gRNA structure to optimize functionality of the entire Cas9 CRISPR-Cas system. For example, loops of the dead gRNA may be extended, without colliding with the Cas9 protein by the insertion of adaptor proteins that can bind to RNA. These adaptor proteins can further recruit effector proteins or fusions which comprise one or more functional domains.

[0379] In some preferred embodiments, the functional domain is a transcriptional activation domain, preferably VP64. In some embodiments, the functional domain is a transcription repression domain, preferably KRAB. In some embodiments, the transcription repression domain is SID, or concatemers of SID (e.g. SID4X). In some embodiments, the functional domain is an epigenetic modifying domain, such that an epigenetic modifying enzyme is provided. In some embodiments, the functional domain is an activation domain, which may be the P65 activation domain.

[0380] An embodiment of the invention is that the above elements are comprised in a single composition or comprised in individual compositions. These compositions may advantageously be applied to a host to elicit a functional effect on the genomic level.

[0381] In general, the dead gRNA are modified in a manner that provides specific binding sites (e.g. aptamers) for adapter proteins comprising one or more functional domains (e.g. via fusion protein) to bind to. The modified dead gRNA are modified such that once the dead gRNA forms a CRISPR complex (i.e. Cas9 binding to dead gRNA and target) the adapter proteins bind and, the functional domain on the adapter protein is positioned in a spatial orientation which is advantageous for the attributed function to be effective. For example, if the functional domain is a transcription activator (e.g. VP64 or p65), the transcription activator is placed in a spatial orientation which allows it to affect the transcription of the target. Likewise, a transcription repressor will be advantageously positioned to affect the transcription of the target and a nuclease (e.g. Fok1) will be advantageously positioned to cleave or partially cleave the target.

[0382] The skilled person will understand that modifications to the dead gRNA which allow for binding of the adapter+functional domain but not proper positioning of the adapter+functional domain (e.g. due to steric hindrance within the three dimensional structure of the CRISPR complex) are modifications which are not intended. The one or more modified dead gRNA may be modified at the tetra loop, the stem loop 1, stem loop 2, or stem loop 3, as described herein, preferably at either the tetra loop or stem loop 2, and most preferably at both the tetra loop and stem loop 2.

[0383] As explained herein the functional domains may be, for example, one or more domains from the group consisting of methylase activity, demethylase activity, transcription activation activity, transcription repression activity, transcription release factor activity, histone modification activity, RNA cleavage activity, DNA cleavage activity, nucleic acid binding activity, and molecular switches (e.g. light inducible). In some cases, it is advantageous that additionally at least one NLS is provided. In some instances, it is advantageous to position the NLS at the N terminus. When more than one functional domain is included, the functional domains may be the same or different.

[0384] The dead gRNA may be designed to include multiple binding recognition sites (e.g. aptamers) specific to the same or different adapter protein. The dead gRNA may be designed to bind to the promoter region −1000-+1 nucleic acids upstream of the transcription start site (i.e. TSS), preferably −200 nucleic acids. This positioning improves functional domains which affect gene activation (e.g. transcription activators) or gene inhibition (e.g. transcription repressors). The modified dead gRNA may be one or more modified dead gRNAs targeted to one or more target loci (e.g. at least 1 gRNA, at least 2 gRNA, at least 5 gRNA, at least 10 gRNA, at least 20 gRNA, at least 30 gRNA, at least 50 gRNA) comprised in a composition.

[0385] The adaptor protein may be any number of proteins that binds to an aptamer or recognition site introduced into the modified dead gRNA and which allows proper positioning of one or more functional domains, once the dead gRNA has been incorporated into the CRISPR complex, to affect the target with the attributed function. As explained in detail in this application such may be coat proteins, preferably bacteriophage coat proteins. The functional domains associated with such adaptor proteins (e.g. in the form of fusion protein) may include, for example, one or more domains from the group consisting of methylase activity, demethylase activity, transcription activation activity, transcription repression activity, transcription release factor activity, histone modification activity, RNA cleavage activity, DNA cleavage activity, nucleic acid binding activity, and molecular switches (e.g. light inducible). Preferred domains are Fok1, VP64, P65, HSF1, MyoD1. In the event that the functional domain is a transcription activator or transcription repressor it is advantageous that additionally at least an NLS is provided and preferably at the N terminus. When more than one functional domain is included, the functional domains may be the same or different. The adaptor protein may utilize known linkers to attach such functional domains.

[0386] Thus, the modified dead gRNA, the (inactivated) Cas9 (with or without functional domains), and the binding protein with one or more functional domains, may each individually be comprised in a composition and administered to a host individually or collectively. Alternatively, these components may be provided in a single composition for administration to a host. Administration to a host may be performed via viral vectors known to the skilled person or described herein for delivery to a host (e.g. lentiviral vector, adenoviral vector, AAV vector). As explained herein, use of different selection markers (e.g. for lentiviral gRNA selection) and concentration of gRNA (e.g. dependent on whether multiple gRNAs are used) may be advantageous for eliciting an improved effect.

[0387] On the basis of this concept, several variations are appropriate to elicit a genomic locus event, including DNA cleavage, gene activation, or gene deactivation. Using the provided compositions, the person skilled in the art can advantageously and specifically target single or multiple loci with the same or different functional domains to elicit one or more genomic locus events. The compositions may be applied in a wide variety of methods for screening in libraries in cells and functional modeling in vivo (e.g. gene activation of lincRNA and identification of function; gain-of-function modeling; loss-of-function modeling; the use the compositions of the invention to establish cell lines and transgenic animals for optimization and screening purposes).

[0388] The current invention comprehends the use of the compositions of the current invention to establish and utilize conditional or inducible CRISPR transgenic cell/animals, which are not believed prior to the present invention or application. For example, the target cell comprises Cas9 conditionally or inducibly (e.g. in the form of Cre dependent constructs) and/or the adapter protein conditionally or inducibly and, on expression of a vector introduced into the target cell, the vector expresses that which induces or gives rise to the condition of Cas9 expression and/or adaptor expression in the target cell. By applying the teaching and compositions of the current invention with the known method of creating a CRISPR complex, inducible genomic events affected by functional domains are also an embodiment of the current invention. One example of this is the creation of a CRISPR knock-in/conditional transgenic animal (e.g. mouse comprising e.g. a Lox-Stop-polyA-Lox(LSL) cassette) and subsequent delivery of one or more compositions providing one or more modified dead gRNA (e.g. −200 nucleotides to TSS of a target gene of interest for gene activation purposes) as described herein (e.g. modified dead gRNA with one or more aptamers recognized by coat proteins, e.g. MS2), one or more adapter proteins as described herein (MS2 binding protein linked to one or more VP64) and means for inducing the conditional animal (e.g. Cre recombinase for rendering Cas9 expression inducible). Alternatively, the adaptor protein may be provided as a conditional or inducible element with a conditional or inducible Cas9 to provide an effective model for screening purposes, which advantageously only requires minimal design and administration of specific dead gRNAs for a broad number of applications.

[0389] In another embodiment the dead guides are further modified to improve specificity. Protected dead guides may be synthesized, whereby secondary structure is introduced into the 3′ end of the dead guide to improve its specificity. A protected guide RNA (pgRNA) comprises a guide sequence capable of hybridizing to a target sequence in a genomic locus of interest in a cell and a protector strand, wherein the protector strand is optionally complementary to the guide sequence and wherein the guide sequence may in part be hybridizable to the protector strand. The pgRNA optionally includes an extension sequence. The thermodynamics of the pgRNA-target DNA hybridization is determined by the number of bases complementary between the guide RNA and target DNA. By employing ‘thermodynamic protection’, specificity of dead gRNA can be improved by adding a protector sequence. For example, one method adds a complementary protector strand of varying lengths to the 3′ end of the guide sequence within the dead gRNA. As a result, the protector strand is bound to at least a portion of the dead gRNA and provides for a protected gRNA (pgRNA). In turn, the dead gRNA references herein may be easily protected using the described embodiments, resulting in pgRNA. The protector strand can be either a separate RNA transcript or strand or a chimeric version joined to the 3′ end of the dead gRNA guide sequence.

### Tandem Guides and Uses in a Multiplex (Tandem) Targeting Approach

[0390] The inventors have shown that CRISPR enzymes as defined herein can employ more than one RNA guide without losing activity. This enables the use of the CRISPR enzymes, systems or complexes as defined herein for targeting multiple DNA targets, genes or gene loci, with a single enzyme, system or complex as defined herein. The guide RNAs may be tandemly arranged, optionally separated by a nucleotide sequence such as a direct repeat as defined herein. The position of the different guide RNAs is the tandem does not influence the activity. It is noted that the terms “CRISPR-Cas system”, “CRISP-Cas complex” “CRISPR complex” and “CRISPR system” are used interchangeably. Also, the terms “CRISPR enzyme”, “Cas enzyme”, or “CRISPR-Cas enzyme”, can be used interchangeably. In preferred embodiments, said CRISPR enzyme, CRISP-Cas enzyme or Cas enzyme is Cas9, or any one of the modified or mutated variants thereof described herein elsewhere.

[0391] In one embodiment, the invention provides a non-naturally occurring or engineered CRISPR enzyme, preferably a class 2 CRISPR enzyme, preferably a Type V or VI CRISPR enzyme as described herein, such as without limitation Cas9 as described herein elsewhere, used for tandem or multiplex targeting. It is to be understood that any of the CRISPR (or CRISPR-Cas or Cas) enzymes, complexes, or systems according to the invention as described herein elsewhere may be used in such an approach. Any of the methods, products, compositions and uses as described herein elsewhere are equally applicable with the multiplex or tandem targeting approach further detailed below. By means of further guidance, the following particular embodiments and embodiments are provided.

[0392] In one embodiment, the invention provides for the use of a Cas9 enzyme, complex or system as defined herein for targeting multiple gene loci. In one embodiment, this can be established by using multiple (tandem or multiplex) guide RNA (gRNA) sequences.

[0393] In one embodiment, the invention provides methods for using one or more elements of a Cas9 enzyme, complex or system as defined herein for tandem or multiplex targeting, wherein said CRISP system comprises multiple guide RNA sequences. Preferably, said gRNA sequences are separated by a nucleotide sequence, such as a direct repeat as defined herein elsewhere.

[0394] The Cas9 enzyme, system or complex as defined herein provides an effective means for modifying multiple target polynucleotides. The Cas9 enzyme, system or complex as defined herein has a wide variety of utility including modifying (e.g., deleting, inserting, translocating, inactivating, activating) one or more target polynucleotides in a multiplicity of cell types. As such the Cas9 enzyme, system or complex as defined herein of the invention has a broad spectrum of applications in, e.g., gene therapy, drug screening, disease diagnosis, and prognosis, including targeting multiple gene loci within a single CRISPR system.

[0395] In one embodiment, the invention provides a Cas9 enzyme, system or complex as defined herein, i.e. a Cas9 CRISPR-Cas complex having a Cas9 protein having at least one destabilization domain associated therewith, and multiple guide RNAs that target multiple nucleic acid molecules such as DNA molecules, whereby each of said multiple guide RNAs specifically targets its corresponding nucleic acid molecule, e.g., DNA molecule. Each nucleic acid molecule target, e.g., DNA molecule can encode a gene product or encompass a gene locus. Using multiple guide RNAs hence enables the targeting of multiple gene loci or multiple genes. In some embodiments the Cas9 enzyme may cleave the DNA molecule encoding the gene product. In some embodiments expression of the gene product is altered. The Cas9 protein and the guide RNAs do not naturally occur together. The invention comprehends the guide RNAs comprising tandemly arranged guide sequences. The invention further comprehends coding sequences for the Cas9 protein being codon optimized for expression in a eukaryotic cell. In a preferred embodiment the eukaryotic cell is a mammalian cell, a plant cell or a yeast cell and in a more preferred embodiment the mammalian cell is a human cell. Expression of the gene product may be decreased. The Cas9 enzyme may form part of a CRISPR system or complex, which further comprises tandemly arranged guide RNAs (gRNAs) comprising a series of 2, 3, 4, 5, 6, 7, 8, 9, 10, 15, 25, 25, 30, or more than 30 guide sequences, each capable of specifically hybridizing to a target sequence in a genomic locus of interest in a cell. In some embodiments, the functional Cas9 CRISPR system or complex binds to the multiple target sequences. In some embodiments, the functional CRISPR system or complex may edit the multiple target sequences, e.g., the target sequences may comprise a genomic locus, and in some embodiments, there may be an alteration of gene expression. In some embodiments, the functional CRISPR system or complex may comprise further functional domains. In some embodiments, the invention provides a method for altering or modifying expression of multiple gene products. The method may comprise introducing into a cell containing said target nucleic acids, e.g., DNA molecules, or containing and expressing target nucleic acid, e.g., DNA molecules; for instance, the target nucleic acids may encode gene products or provide for expression of gene products (e.g., regulatory sequences).

[0396] In preferred embodiments, the CRISPR enzyme used for multiplex targeting is Cas9, or the CRISPR system or complex comprises Cas9. In some embodiments, the CRISPR enzyme used for multiplex targeting is AsCas9, or the CRISPR system or complex used for multiplex targeting comprises an AsCas9. In some embodiments, the CRISPR enzyme is an LbCas9, or the CRISPR system or complex comprises LbCas9. In some embodiments, the Cas9 enzyme used for multiplex targeting cleaves both strands of DNA to produce a double strand break (DSB). In some embodiments, the CRISPR enzyme used for multiplex targeting is a nickase. In some embodiments, the Cas9 enzyme used for multiplex targeting is a dual nickase. In some embodiments, the Cas9 enzyme used for multiplex targeting is a Cas9 enzyme such as a DD Cas9 enzyme as defined herein elsewhere.

[0397] In some general embodiments, the Cas9 enzyme used for multiplex targeting is associated with one or more functional domains. In some more specific embodiments, the CRISPR enzyme used for multiplex targeting is a deadCas9 as defined herein elsewhere.

[0398] In an embodiment, the present invention provides a means for delivering the Cas9 enzyme, system or complex for use in multiple targeting as defined herein or the polynucleotides defined herein. Non-limiting examples of such delivery means are e.g. particle(s) delivering component(s) of the complex, vector(s) comprising the polynucleotide(s) discussed herein (e.g., encoding the CRISPR enzyme, providing the nucleotides encoding the CRISPR complex). In some embodiments, the vector may be a plasmid or a viral vector such as AAV, or lentivirus. Transient transfection with plasmids, e.g., into HEK cells may be advantageous, especially given the size limitations of AAV and that while Cas9 fits into AAV, one may reach an upper limit with additional guide RNAs.

[0399] Also provided is a model that constitutively expresses the Cas9 enzyme, complex or system as used herein for use in multiplex targeting. The organism may be transgenic and may have been transfected with the present vectors or may be the offspring of an organism so transfected. In a further embodiment, the present invention provides compositions comprising the CRISPR enzyme, system and complex as defined herein or the polynucleotides or vectors described herein. Also provides are Cas9 CRISPR systems or complexes comprising multiple guide RNAs, preferably in a tandemly arranged format. Said different guide RNAs may be separated by nucleotide sequences such as direct repeats.

[0400] Also provided is a method of treating a subject, e.g., a subject in need thereof, comprising inducing gene editing by transforming the subject with the polynucleotide encoding the Cas9 CRISPR system or complex or any of polynucleotides or vectors described herein and administering them to the subject. A suitable repair template may also be provided, for example delivered by a vector comprising said repair template. Also provided is a method of treating a subject, e.g., a subject in need thereof, comprising inducing transcriptional activation or repression of multiple target gene loci by transforming the subject with the polynucleotides or vectors described herein, wherein said polynucleotide or vector encodes or comprises the Cas9 enzyme, complex or system comprising multiple guide RNAs, preferably tandemly arranged. Where any treatment is occurring ex vivo, for example in a cell culture, then it will be appreciated that the term ‘subject’ may be replaced by the phrase “cell or cell culture.”

[0401] Compositions comprising Cas9 enzyme, complex or system comprising multiple guide RNAs, preferably tandemly arranged, or the polynucleotide or vector encoding or comprising said Cas9 enzyme, complex or system comprising multiple guide RNAs, preferably tandemly arranged, for use in the methods of treatment as defined herein elsewhere are also provided. A kit of parts may be provided including such compositions. Use of said composition in the manufacture of a medicament for such methods of treatment are also provided. Use of a Cas9 CRISPR system in screening is also provided by the present invention, e.g., gain of function screens. Cells which are artificially forced to overexpress a gene are be able to down regulate the gene over time (re-establishing equilibrium) e.g. by negative feedback loops. By the time the screen starts the unregulated gene might be reduced again. Using an inducible Cas9 activator allows one to induce transcription right before the screen and therefore minimizes the chance of false negative hits. Accordingly, by use of the instant invention in screening, e.g., gain of function screens, the chance of false negative results may be minimized.

[0402] In one embodiment, the invention provides an engineered, non-naturally occurring CRISPR system comprising a Cas9 protein and multiple guide RNAs that each specifically target a DNA molecule encoding a gene product in a cell, whereby the multiple guide RNAs each target their specific DNA molecule encoding the gene product and the Cas9 protein cleaves the target DNA molecule encoding the gene product, whereby expression of the gene product is altered; and, wherein the CRISPR protein and the guide RNAs do not naturally occur together. The invention comprehends the multiple guide RNAs comprising multiple guide sequences, preferably separated by a nucleotide sequence such as a direct repeat and optionally fused to a tracr sequence. In an embodiment of the invention, the CRISPR protein is a type V or VI CRISPR-Cas protein and in a more preferred embodiment the CRISPR protein is a Cas9 protein. The invention further comprehends a Cas9 protein being codon optimized for expression in a eukaryotic cell. In a preferred embodiment, the eukaryotic cell is a mammalian cell and in a more preferred embodiment the mammalian cell is a human cell. In a further embodiment of the invention, the expression of the gene product is decreased.

[0403] In another embodiment, the invention provides an engineered, non-naturally occurring vector system comprising one or more vectors comprising a first regulatory element operably linked to the multiple Cas9 CRISPR system guide RNAs that each specifically target a DNA molecule encoding a gene product and a second regulatory element operably linked coding for a CRISPR protein. Both regulatory elements may be located on the same vector or on different vectors of the system. The multiple guide RNAs target the multiple DNA molecules encoding the multiple gene products in a cell and the CRISPR protein may cleave the multiple DNA molecules encoding the gene products (it may cleave one or both strands or have substantially no nuclease activity), whereby expression of the multiple gene products is altered; and, wherein the CRISPR protein and the multiple guide RNAs do not naturally occur together. In a preferred embodiment, the CRISPR protein is Cas9 protein, optionally codon optimized for expression in a eukaryotic cell. In a preferred embodiment, the eukaryotic cell is a mammalian cell, a plant cell or a yeast cell and in a more preferred embodiment the mammalian cell is a human cell. In a further embodiment of the invention, the expression of each of the multiple gene products is altered, preferably decreased.

[0404] In one embodiment, the invention provides a vector system comprising one or more vectors. In some embodiments, the system comprises (a) a first regulatory element operably linked to a direct repeat sequence and one or more insertion sites for inserting one or more guide sequences up- or downstream (whichever applicable) of the direct repeat sequence, wherein when expressed, the one or more guide sequence(s) direct(s) sequence-specific binding of the CRISPR complex to the one or more target sequence(s) in a eukaryotic cell, wherein the CRISPR complex comprises a Cas9 enzyme complexed with the one or more guide sequence(s) that is hybridized to the one or more target sequence(s); and (b) a second regulatory element operably linked to an enzyme-coding sequence encoding said Cas9 enzyme, preferably comprising at least one nuclear localization sequence and/or at least one NES; wherein components (a) and (b) are located on the same or different vectors of the system. Where applicable, a tracr sequence may also be provided. In some embodiments, component (a) further comprises two or more guide sequences operably linked to the first regulatory element, wherein when expressed, each of the two or more guide sequences direct sequence specific binding of a Cas9 CRISPR complex to a different target sequence in a eukaryotic cell. In some embodiments, the CRISPR complex comprises one or more nuclear localization sequences and/or one or more NES of sufficient strength to drive accumulation of said Cas9 CRISPR complex in a detectable amount in or out of the nucleus of a eukaryotic cell. In some embodiments, the first regulatory element is a polymerase III promoter. In some embodiments, the second regulatory element is a polymerase II promoter. In some embodiments, each of the guide sequences is at least 16, 17, 18, 19, 20, 25 nucleotides, or between 16-30, or between 16-25, or between 16-20 nucleotides in length.

[0405] Recombinant expression vectors can comprise the polynucleotides encoding the Cas9 enzyme, system or complex for use in multiple targeting as defined herein in a form suitable for expression of the nucleic acid in a host cell, which means that the recombinant expression vectors include one or more regulatory elements, which may be selected on the basis of the host cells to be used for expression, that is operatively-linked to the nucleic acid sequence to be expressed.

[0406] In some embodiments, a host cell is transiently or non-transiently transfected with one or more vectors comprising the polynucleotides encoding the Cas9 enzyme, system or complex for use in multiple targeting as defined herein. In some embodiments, a cell is transfected as it naturally occurs in a subject. In some embodiments, a cell that is transfected is taken from a subject. In some embodiments, the cell is derived from cells taken from a subject, such as a cell line. A wide variety of cell lines for tissue culture are known in the art and exemplified herein elsewhere. Cell lines are available from a variety of sources known to those with skill in the art (see, e.g., the American Type Culture Collection (ATCC) (Manassas, Va.)). In some embodiments, a cell transfected with one or more vectors comprising the polynucleotides encoding the Cas9 enzyme, system or complex for use in multiple targeting as defined herein is used to establish a new cell line comprising one or more vector-derived sequences. In some embodiments, a cell transiently transfected with the components of a Cas9 CRISPR system or complex for use in multiple targeting as described herein (such as by transient transfection of one or more vectors, or transfection with RNA), and modified through the activity of a Cas9 CRISPR system or complex, is used to establish a new cell line comprising cells containing the modification but lacking any other exogenous sequence. In some embodiments, cells transiently or non-transiently transfected with one or more vectors comprising the polynucleotides encoding the Cas9 enzyme, system or complex for use in multiple targeting as defined herein, or cell lines derived from such cells are used in assessing one or more test compounds.

[0407] The term “regulatory element” is as defined herein elsewhere.

[0408] Advantageous vectors include lentiviruses and adeno-associated viruses, and types of such vectors can also be selected for targeting particular types of cells.

[0409] In one embodiment, the invention provides a eukaryotic host cell comprising (a) a first regulatory element operably linked to a direct repeat sequence and one or more insertion sites for inserting one or more guide RNA sequences up- or downstream (whichever applicable) of the direct repeat sequence, wherein when expressed, the guide sequence(s) direct(s) sequence-specific binding of the Cas9 CRISPR complex to the respective target sequence(s) in a eukaryotic cell, wherein the Cas9 CRISPR complex comprises a Cas9 enzyme complexed with the one or more guide sequence(s) that is hybridized to the respective target sequence(s); and/or (b) a second regulatory element operably linked to an enzyme-coding sequence encoding said Cas9 enzyme comprising preferably at least one nuclear localization sequence and/or NES. In some embodiments, the host cell comprises components (a) and (b). Where applicable, a tracr sequence may also be provided. In some embodiments, component (a), component (b), or components (a) and (b) are stably integrated into a genome of the host eukaryotic cell. In some embodiments, component (a) further comprises two or more guide sequences operably linked to the first regulatory element, and optionally separated by a direct repeat, wherein when expressed, each of the two or more guide sequences direct sequence specific binding of a Cas9 CRISPR complex to a different target sequence in a eukaryotic cell. In some embodiments, the Cas9 enzyme comprises one or more nuclear localization sequences and/or nuclear export sequences or NES of sufficient strength to drive accumulation of said CRISPR enzyme in a detectable amount in and/or out of the nucleus of a eukaryotic cell.

[0410] In some embodiments, the Cas9 enzyme is a type V or VI CRISPR system enzyme. In some embodiments, the Cas9 enzyme is a Cas9 enzyme. In some embodiments, the Cas9 enzyme is derived from Francisella tularensis 1, Francisella tularensis subsp. novicida, Prevotella albensis, Lachnospiraceae bacterium MC2017 1, Butyrivibrio proteoclasticus, Peregrinibacteria bacterium GW2011_GWA2_33_10, Parcubacteria bacterium GW2011_GWC2_44_17, Smithella sp. SCADC, Acidaminococcus sp. BV3L6, Lachnospiraceae bacterium MA2020, Candidatus Methanoplasma termitum, Eubacterium eligens, Moraxella bovoculi 237, Leptospira inadai, Lachnospiraceae bacterium ND2006, Porphyromonas crevioricanis 3, Prevotella disiens, or Porphyromonas macacae Cas9, and may include further alterations or mutations of the Cas9 as defined herein elsewhere, and can be a chimeric Cas9. In some embodiments, the Cas9 enzyme is codon-optimized for expression in a eukaryotic cell. In some embodiments, the CRISPR enzyme directs cleavage of one or two strands at the location of the target sequence. In some embodiments, the first regulatory element is a polymerase III promoter. In some embodiments, the second regulatory element is a polymerase II promoter. In some embodiments, the one or more guide sequence(s) is (are each) at least 16, 17, 18, 19, 20, 25 nucleotides, or between 16-30, or between 16-25, or between 16-20 nucleotides in length. When multiple guide RNAs are used, they are preferably separated by a direct repeat sequence.

[0411] In one embodiment, the invention provides a method of modifying multiple target polynucleotides in a host cell such as a eukaryotic cell. In some embodiments, the method comprises allowing a Cas9CRISPR complex to bind to multiple target polynucleotides, e.g., to effect cleavage of said multiple target polynucleotides, thereby modifying multiple target polynucleotides, wherein the Cas9CRISPR complex comprises a Cas9 enzyme complexed with multiple guide sequences each of the being hybridized to a specific target sequence within said target polynucleotide, wherein said multiple guide sequences are linked to a direct repeat sequence. Where applicable, a tracr sequence may also be provided (e.g. to provide a single guide RNA, sgRNA). In some embodiments, said cleavage comprises cleaving one or two strands at the location of each of the target sequence by said Cas9 enzyme. In some embodiments, said cleavage results in decreased transcription of the multiple target genes. In some embodiments, the method further comprises repairing one or more of said cleaved target polynucleotide by homologous recombination with an exogenous template polynucleotide, wherein said repair results in a mutation comprising an insertion, deletion, or substitution of one or more nucleotides of one or more of said target polynucleotides. In some embodiments, said mutation results in one or more amino acid changes in a protein expressed from a gene comprising one or more of the target sequence(s). In some embodiments, the method further comprises delivering one or more vectors to said eukaryotic cell, wherein the one or more vectors drive expression of one or more of: the Cas9 enzyme and the multiple guide RNA sequence linked to a direct repeat sequence. Where applicable, a tracr sequence may also be provided. In some embodiments, said vectors are delivered to the eukaryotic cell in a subject. In some embodiments, said modifying takes place in said eukaryotic cell in a cell culture. In some embodiments, the method further comprises isolating said eukaryotic cell from a subject prior to said modifying. In some embodiments, the method further comprises returning said eukaryotic cell and/or cells derived therefrom to said subject.

[0412] In one embodiment, the invention provides a method of modifying expression of multiple polynucleotides in a eukaryotic cell. In some embodiments, the method comprises allowing a Cas9 CRISPR complex to bind to multiple polynucleotides such that said binding results in increased or decreased expression of said polynucleotides; wherein the Cas9 CRISPR complex comprises a Cas9 enzyme complexed with multiple guide sequences each specifically hybridized to its own target sequence within said polynucleotide, wherein said guide sequences are linked to a direct repeat sequence. Where applicable, a tracr sequence may also be provided. In some embodiments, the method further comprises delivering one or more vectors to said eukaryotic cells, wherein the one or more vectors drive expression of one or more of: the Cas9 enzyme and the multiple guide sequences linked to the direct repeat sequences. Where applicable, a tracr sequence may also be provided.

[0413] In one embodiment, the invention provides a recombinant polynucleotide comprising multiple guide RNA sequences up- or downstream (whichever applicable) of a direct repeat sequence, wherein each of the guide sequences when expressed directs sequence-specific binding of a Cas9CRISPR complex to its corresponding target sequence present in a eukaryotic cell. In some embodiments, the target sequence is a viral sequence present in a eukaryotic cell. Where applicable, a tracr sequence may also be provided. In some embodiments, the target sequence is a proto-oncogene or an oncogene.

[0414] Embodiments of the invention encompass a non-naturally occurring or engineered composition that may comprise a guide RNA (gRNA) comprising a guide sequence capable of hybridizing to a target sequence in a genomic locus of interest in a cell and a Cas9 enzyme as defined herein that may comprise at least one or more nuclear localization sequences.

[0415] An embodiment of the invention encompasses methods of modifying a genomic locus of interest to change gene expression in a cell by introducing into the cell any of the compositions described herein.

[0416] An embodiment of the invention is that the above elements are comprised in a single composition or comprised in individual compositions. These compositions may advantageously be applied to a host to elicit a functional effect on the genomic level.

### Engineered Cells and Organisms Expressing Said Engineered AAV Capsids

[0417] Described herein are engineered cells that can include one or more of the engineered AAV capsid polynucleotides, polypeptides, vectors, and/or vector systems. In some embodiments, one or more of the engineered AAV capsid polynucleotides can be expressed in the engineered cells. In some embodiments, the engineered cells can be capable of producing engineered AAV capsid proteins and/or engineered AAV capsid particles that are described elsewhere herein. Also described herein are modified or engineered organisms that can include one or more engineered cells described herein. The engineered cells can be engineered to express a cargo molecule (e.g. a cargo polynucleotide) dependently or independently of an engineered AAV capsid polynucleotide as described elsewhere herein.

[0418] A wide variety of animals, plants, algae, fungi, yeast, etc. and animal, plant, algae, fungus, yeast cell or tissue systems may be engineered to express one or more nucleic acid constructs of the engineered AAV capsid system described herein using various transformation methods mentioned elsewhere herein. This can produce organisms that can produce engineered AAV capsid particles, such as for production purposes, engineered AAV capsid design and/or generation, and/or model organisms. In some embodiments, the polynucleotide(s) encoding one or more components of the engineered AAV capsid system described herein can be stably or transiently incorporated into one or more cells of a plant, animal, algae, fungus, and/or yeast or tissue system. In some embodiments, one or more of engineered AAV capsid system polynucleotides are genomically incorporated into one or more cells of a plant, animal, algae, fungus, and/or yeast or tissue system. Further embodiments of the modified organisms and systems are described elsewhere herein. In some embodiments, one or more components of the engineered AAV capsid system described herein are expressed in one or more cells of the plant, animal, algae, fungus, yeast, or tissue systems.

### Engineered Cells

[0419] Described herein are various embodiments of engineered cells that can include one or more of the engineered AAV capsid system polynucleotides, polypeptides, vectors, and/or vector systems described elsewhere herein. In some embodiments, the cells can express one or more of the engineered AAV capsid polynucleotides and can produce one or more engineered AAV capsid particles, which are described in greater detail herein. Such cells are also referred to herein as “producer cells”. It will be appreciated that these engineered cells are different from “modified cells” described elsewhere herein in that the modified cells are not necessarily producer cells (i.e. they do not make engineered GTA delivery particles) unless they include one or more of the engineered AAV capsid polynucleotides, engineered AAV capsid vectors or other vectors described herein that render the cells capable of producing an engineered AAV capsid particle. Modified cells can be recipient cells of an engineered AAV capsid particles and can, in some embodiments, be modified by the engineered AAV capsid particle(s) and/or a cargo polynucleotide delivered to the recipient cell. Modified cells are discussed in greater detail elsewhere herein. The term modification can be used in connection with modification of a cell that is not dependent on being a recipient cell. For example, isolated cells can be modified prior to receiving an engineered AAV capsid molecule.

[0420] In an embodiment, the invention provides a non-human eukaryotic organism; for example, a multicellular eukaryotic organism, including a eukaryotic host cell containing one or more components of an engineered delivery system described herein according to any of the described embodiments. In other embodiments, the invention provides a eukaryotic organism, preferably a multicellular eukaryotic organism, comprising a eukaryotic host cell containing one or more components of an engineered delivery system described herein according to any of the described embodiments. In some embodiments, the organism is a host of AAV.

[0421] In particular embodiments, the plants, algae, fungi, yeast, etc., cells or parts obtained are transgenic plants, comprising an exogenous DNA sequence incorporated into the genome of all or part of the cells.

[0422] The engineered cell can be a prokaryotic cell. The prokaryotic cell can be bacterial cell. The prokaryotic cell can be an archaea cell. The bacterial cell can be any suitable bacterial cell. Suitable bacterial cells can be from the genus Escherichia, Bacillus, Lactobacillus, Rhodococcus, Rodhobacter, Synechococcus, Synechoystis, Pseudomonas, Pseudoaltermonas, Stenotrophamonas, and Streptomyces Suitable bacterial cells include, but are not limited to Escherichia coli cells, Caulobacter crescentus cells, Rodhobacter sphaeroides cells, Psedoaltermonas haloplanktis cells. Suitable strains of bacterial include, but are not limited to BL21(DE3), DL21(DE3)-pLysS, BL21 Star-pLysS, BL21-SI, BL21-AI, Tuner, Tuner pLysS, Origami, Origami B pLysS, Rosetta, Rosetta pLysS, Rosetta-gami-pLysS, BL21 CodonPlus, AD494, BL2trxB, HMS174, NovaBlue(DE3), BLR, C41(DE3), C43(DE3), Lemo21(DE3), Shuffle T7, ArcticExpress and ArticExpress (DE3).

[0423] The engineered cell can be a eukaryotic cell. The eukaryotic cells may be those of or derived from a particular organism, such as a plant or a mammal, including but not limited to human, or non-human eukaryote or animal or mammal as herein discussed, e.g., mouse, rat, rabbit, dog, livestock, or non-human mammal or primate. In some embodiments the engineered cell can be a cell line. Examples of cell lines include, but are not limited to, C8161, CCRF-CEM, MOLT, mIMCD-3, NHDF, HeLa-S3, Huh1, Huh4, Huh7, HUVEC, HASMC, HEKn, HEKa, MiaPaCell, Panc1, PC-3, TF1, CTLL-2, C1R, Rat6, CV1, RPTE, A10, T24, J82, A375, ARH-77, Calu1, SW480, SW620, SKOV3, SK-UT, CaCo2, P388D1, SEM-K2, WEHI-231, HB56, TIB55, Jurkat, J45.01, LRMB, Bcl-1, BC-3, IC21, DLD2, Raw264.7, NRK, NRK-52E, MRCS, MEF, Hep G2, HeLa B, HeLa T4, COS, COS-1, COS-6, COS-M6A, BS-C-1 monkey kidney epithelial, BALB/3T3 mouse embryo fibroblast, 3T3 Swiss, 3T3-L1, 132-d5 human fetal fibroblasts; 10.1 mouse fibroblasts, 293-T, 3T3, 721, 9L, A2780, A2780ADR, A2780cis, A172, A20, A253, A431, A-549, ALC, B16, B35, BCP-1 cells, BEAS-2B, bEnd.3, BHK-21, BR 293, BxPC3, C3H-10T1/2, C6/36, Cal-27, CHO, CHO-7, CHO-IR, CHO-K1, CHO-K2, CHO-T, CHO Dhfr −/−, COR-L23, COR-L23/CPR, COR-L23/5010, COR-L23/R23, COS-7, COV-434, CML T1, CMT, CT26, D17, DH82, DU145, DuCaP, EL4, EM2, EM3, EMT6/AR1, EMT6/AR10.0, FM3, H1299, H69, HB54, HB55, HCA2, HEK-293, HeLa, Hepa1c1c7, HL-60, HMEC, HT-29, Jurkat, JY cells, K562 cells, Ku812, KCL22, KG1, KYO1, LNCap, Ma-Mel 1-48, MC-38, MCF-7, MCF-10A, MDA-MB-231, MDA-MB-468, MDA-MB-435, MDCK II, MDCK II, MOR/0.2R, MONO-MAC 6, MTD-1A, MyEnd, NCI-H69/CPR, NCI-H69/LX10, NCI-H69/LX20, NCI-H69/LX4, NIH-3T3, NALM-1, NW-145, OPCN/OPCT cell lines, Peer, PNT-1A/PNT 2, RenCa, RIN-5F, RMA/RMAS, Saos-2 cells, Sf-9, SkBr3, T2, T-47D, T84, THP1 cell line, U373, U87, U937, VCaP, Vero cells, WM39, WT-49, X63, YAC-1, YAR, and transgenic varieties thereof. Cell lines are available from a variety of sources known to those with skill in the art (see, e.g., the American Type Culture Collection (ATCC) (Manassas, Va.)).

[0424] In some embodiments, the engineered cell is a muscle cell (e.g. cardiac muscle, skeletal muscle, and/or smooth muscle), bone cell, blood cell, immune cell (including but not limited to B cells, macrophages, T-cells, CAR-T cells, and the like), kidney cells, bladder cells, lung cells, heart cells, liver cells, brain cells, neurons, skin cells, stomach cells, neuronal support cells, intestinal cells, epithelial cells, endothelial cells, stem or other progenitor cells, adrenal gland cells, cartilage cells, and combinations thereof.

[0425] In some embodiments, the engineered cell can be a fungus cell. As used herein, a “fungal cell” refers to any type of eukaryotic cell within the kingdom of fungi. Phyla within the kingdom of fungi include Ascomycota, Basidiomycota, Blastocladiomycota, Chytridiomycota, Glomeromycota, Microsporidia, and Neocallimastigomycota. Fungal cells may include yeasts, molds, and filamentous fungi. In some embodiments, the fungal cell is a yeast cell.

[0426] As used herein, the term “yeast cell” refers to any fungal cell within the phyla Ascomycota and Basidiomycota. Yeast cells may include budding yeast cells, fission yeast cells, and mold cells. Without being limited to these organisms, many types of yeast used in laboratory and industrial settings are part of the phylum Ascomycota. In some embodiments, the yeast cell is an S. cerervisiae, Kluyveromyces marxianus, or Issatchenkia orientalis cell. Other yeast cells may include without limitation Candida spp. (e.g., Candida albicans), Yarrowia spp. (e.g., Yarrowia lipolytica), Pichia spp. (e.g., Pichia pastoris), Kluyveromyces spp. (e.g., Kluyveromyces lactis and Kluyveromyces marxianus), Neurospora spp. (e.g., Neurospora crassa), Fusarium spp. (e.g., Fusarium oxysporum), and Issatchenkia spp. (e.g., Issatchenkia orientalis, a.k.a. Pichia kudriavzevii and Candida acidothermophilum). In some embodiments, the fungal cell is a filamentous fungal cell. As used herein, the term “filamentous fungal cell” refers to any type of fungal cell that grows in filaments, i.e., hyphae or mycelia. Examples of filamentous fungal cells may include without limitation Aspergillus spp. (e.g., Aspergillus niger), Trichoderma spp. (e.g., Trichoderma reesei), Rhizopus spp. (e.g., Rhizopus oryzae), and Mortierella spp. (e.g., Mortierella isabellina).

[0427] In some embodiments, the fungal cell is an industrial strain. As used herein, “industrial strain” refers to any strain of fungal cell used in or isolated from an industrial process, e.g., production of a product on a commercial or industrial scale. Industrial strain may refer to a fungal species that is typically used in an industrial process, or it may refer to an isolate of a fungal species that may be also used for non-industrial purposes (e.g., laboratory research). Examples of industrial processes may include fermentation (e.g., in production of food or beverage products), distillation, biofuel production, production of a compound, and production of a polypeptide. Examples of industrial strains can include, without limitation, JAY270 and ATCC4124.

[0428] In some embodiments, the fungal cell is a polyploid cell. As used herein, a “polyploid” cell may refer to any cell whose genome is present in more than one copy. A polyploid cell may refer to a type of cell that is naturally found in a polyploid state, or it may refer to a cell that has been induced to exist in a polyploid state (e.g., through specific regulation, alteration, inactivation, activation, or modification of meiosis, cytokinesis, or DNA replication). A polyploid cell may refer to a cell whose entire genome is polyploid, or it may refer to a cell that is polyploid in a particular genomic locus of interest.

[0429] In some embodiments, the fungal cell is a diploid cell. As used herein, a “diploid” cell may refer to any cell whose genome is present in two copies. A diploid cell may refer to a type of cell that is naturally found in a diploid state, or it may refer to a cell that has been induced to exist in a diploid state (e.g., through specific regulation, alteration, inactivation, activation, or modification of meiosis, cytokinesis, or DNA replication). For example, the S. cerevisiae strain S228C may be maintained in a haploid or diploid state. A diploid cell may refer to a cell whose entire genome is diploid, or it may refer to a cell that is diploid in a particular genomic locus of interest. In some embodiments, the fungal cell is a haploid cell. As used herein, a “haploid” cell may refer to any cell whose genome is present in one copy. A haploid cell may refer to a type of cell that is naturally found in a haploid state, or it may refer to a cell that has been induced to exist in a haploid state (e.g., through specific regulation, alteration, inactivation, activation, or modification of meiosis, cytokinesis, or DNA replication). For example, the S. cerevisiae strain S228C may be maintained in a haploid or diploid state. A haploid cell may refer to a cell whose entire genome is haploid, or it may refer to a cell that is haploid in a particular genomic locus of interest.

[0430] In some embodiments, the engineered cell is a cell obtained from a subject. In some embodiments, the subject is a healthy or non-diseased subject. In some embodiments, the subject is a subject with a desired physiological and/or biological characteristic such that when a engineered AAV capsid particle is produced it can package one or more cargo polynucleotides that can be related to the desired physiological and/or biological characteristic and/or capable of modifying the desired physiological and/or biological characteristic. Thus, the cargo polynucleotides of the produced engineered AAV capsid particle can be capable of transferring the desired characteristic to a recipient cell. In some embodiments, the cargo polynucleotides are capable of modifying a polynucleotide of the engineered cell such that the engineered cell has a desired physiological and/or biological characteristic.

[0431] In some embodiments, a cell transfected with one or more vectors described herein is used to establish a new cell line comprising one or more vector-derived sequences.

[0432] The engineered cells can be used to produce engineered AAV capsid polynucleotides, vectors, and/or particles. In some embodiments, the engineered AAV capsid polynucleotides, vectors, and/or particles are produced, harvested, and/or delivered to a subject in need thereof. In some embodiments, the engineered cells are delivered to a subject. Other uses for the engineered cells are described elsewhere herein. In some embodiments, the engineered cells can be included in formulations and/or kits described elsewhere herein.

[0433] The engineered cells can be stored short-term or long-term for use at a later time. Suitable storage methods are generally known in the art. Further, methods of restoring the stored cells for use (such as thawing, reconstitution, and otherwise stimulating metabolism in the engineered cell after storage) at a later time are also generally known in the art.

### Formulations

[0434] Component(s) of the engineered AAV capsid system, engineered cells, engineered AAV capsid particles, and/or combinations thereof can be included in a formulation that can be delivered to a subject or a cell. In some embodiments, the formulation is a pharmaceutical formulation. One or more of the polypeptides, polynucleotides, vectors, cells, and combinations thereof described herein can be provided to a subject in need thereof or a cell alone or as an active ingredient, such as in a pharmaceutical formulation. As such, also described herein are pharmaceutical formulations containing an amount of one or more of the polypeptides, polynucleotides, vectors, cells, or combinations thereof described herein. In some embodiments, the pharmaceutical formulation can contain an effective amount of the one or more of the polypeptides, polynucleotides, vectors, cells, and combinations thereof described herein. The pharmaceutical formulations described herein can be administered to a subject in need thereof or a cell.

[0435] In some embodiments, the amount of the one or more of the polypeptides, polynucleotides, vectors, cells, virus particles, nanoparticles, other delivery particles, and combinations thereof described herein contained in the pharmaceutical formulation can range from about 1 μg/kg to about 10 mg/kg based upon the bodyweight of the subject in need thereof or average bodyweight of the specific patient population to which the pharmaceutical formulation can be administered. The amount of the one or more of the polypeptides, polynucleotides, vectors, cells, and combinations thereof described herein in the pharmaceutical formulation can range from about 1 μg to about 10 g, from about 10 nL to about 10 ml. In embodiments where the pharmaceutical formulation contains one or more cells, the amount can range from about 1 cell to 1×10², 1×10³, 1×10⁴, 1×10⁵, 1×10⁶, 1×10⁷, 1×10⁸, 1×10⁹, 1×10¹⁰ or more cells. In embodiments where the pharmaceutical formulation contains one or more cells, the amount can range from about 1 cell to 1×10², 1×10³, 1×10⁴, 1×10⁵, 1×10⁶, 1×10⁷, 1×10⁸, 1×10⁹, 1×10¹⁰ or more cells per nL, μL, mL, or L.

[0436] In embodiments, were engineered AAV capsid particles are included in the formulation, the formulation can contain 1 to 1×10¹, 1×10², 1×10³, 1×10⁴, 1×10⁵, 1×10⁶, 1×10⁷, 1×10⁸, 1×10⁹, 1×10¹⁰, 1×10¹¹, 1×10¹², 1×10¹³, 1×10¹⁴, 1×10¹⁵, 1×10¹⁶, 1×10¹⁷, 1×10¹⁸, 1×10¹⁹, or 1×10²⁰ transducing units (TU)/mL of the engineered AAV capsid particles. In some embodiments, the formulation can be 0.1 to 100 mL in volume and can contain 1 to 1×10¹, 1×10², 1×10³, 1×10⁴, 1×10⁵, 1×10⁶, 1×10⁷, 1×10⁸, 1×10⁹, 1×10¹⁰, 1×10¹¹, 1×10¹², 1×10¹³, 1×10¹⁴, 1×10¹⁵, 1×10¹⁶, 1×10¹⁷, 1×10¹⁸, 1×10¹⁹, or 1×10²⁰ transducing units (TU)/mL of the engineered AAV capsid particles.

### Pharmaceutically Acceptable Carriers and Auxiliary Ingredients and Agents

[0437] In embodiments, the pharmaceutical formulation containing an amount of one or more of the polypeptides, polynucleotides, vectors, cells, virus particles, nanoparticles, other delivery particles, and combinations thereof described herein can further include a pharmaceutically acceptable carrier. Suitable pharmaceutically acceptable carriers include, but are not limited to, water, salt solutions, alcohols, gum arabic, vegetable oils, benzyl alcohols, polyethylene glycols, gelatin, carbohydrates such as lactose, amylose or starch, magnesium stearate, talc, silicic acid, viscous paraffin, perfume oil, fatty acid esters, hydroxy methylcellulose, and polyvinyl pyrrolidone, which do not deleteriously react with the active composition.

[0438] The pharmaceutical formulations can be sterilized, and if desired, mixed with auxiliary agents, such as lubricants, preservatives, stabilizers, wetting agents, emulsifiers, salts for influencing osmotic pressure, buffers, coloring, flavoring and/or aromatic substances, and the like which do not deleteriously react with the active composition.

[0439] In addition to an amount of one or more of the polypeptides, polynucleotides, vectors, cells, engineered AAV capsid particles, nanoparticles, other delivery particles, and combinations thereof described herein, the pharmaceutical formulation can also include an effective amount of an auxiliary active agent, including but not limited to, polynucleotides, amino acids, peptides, polypeptides, antibodies, aptamers, ribozymes, hormones, immunomodulators, antipyretics, anxiolytics, antipsychotics, analgesics, antispasmodics, anti-inflammatories, anti-histamines, anti-infectives, chemotherapeutics, and combinations thereof.

[0440] Suitable hormones include, but are not limited to, amino-acid derived hormones (e.g. melatonin and thyroxine), small peptide hormones and protein hormones (e.g. thyrotropin-releasing hormone, vasopressin, insulin, growth hormone, luteinizing hormone, follicle-stimulating hormone, and thyroid-stimulating hormone), eicosanoids (e.g. arachidonic acid, lipoxins, and prostaglandins), and steroid hormones (e.g. estradiol, testosterone, tetrahydro testosterone Cortisol). Suitable immunomodulators include, but are not limited to, prednisone, azathioprine, 6-MP, cyclosporine, tacrolimus, methotrexate, interleukins (e.g. IL-2, IL-7, and IL-12), cytokines (e.g. interferons (e.g. IFN-a, IFN-β, IFN-ε, IFN-K, IFN-ω, and IFN-γ), granulocyte colony-stimulating factor, and imiquimod), chemokines (e.g. CCL3, CCL26 and CXCL7), cytosine phosphate-guanosine, oligodeoxynucleotides, glucans, antibodies, and aptamers).

[0441] Suitable antipyretics include, but are not limited to, non-steroidal anti-inflammants (e.g. ibuprofen, naproxen, ketoprofen, and nimesulide), aspirin and related salicylates (e.g. choline salicylate, magnesium salicylae, and sodium salicaylate), paracetamol/acetaminophen, metamizole, nabumetone, phenazone, and quinine.

[0442] Suitable anxiolytics include, but are not limited to, benzodiazepines (e.g. alprazolam, bromazepam, chlordiazepoxide, clonazepam, clorazepate, diazepam, flurazepam, lorazepam, oxazepam, temazepam, triazolam, and tofisopam), serotenergic antidepressants (e.g. selective serotonin reuptake inhibitors, tricyclic antidepressants, and monoamine oxidase inhibitors), mebicar, afobazole, selank, bromantane, emoxypine, azapirones, barbiturates, hydroxyzine, pregabalin, validol, and beta blockers.

[0443] Suitable antipsychotics include, but are not limited to, benperidol, bromoperidol, droperidol, haloperidol, moperone, pipaperone, timiperone, fluspirilene, penfluridol, pimozide, acepromazine, chlorpromazine, cyamemazine, dizyrazine, fluphenazine, levomepromazine, mesoridazine, perazine, pericyazine, perphenazine, pipotiazine, prochlorperazine, promazine, promethazine, prothipendyl, thioproperazine, thioridazine, trifluoperazine, triflupromazine, chlorprothixene, clopenthixol, flupentixol, tiotixene, zuclopenthixol, clotiapine, loxapine, prothipendyl, carpipramine, clocapramine, molindone, mosapramine, sulpiride, veralipride, amisulpride, amoxapine, aripiprazole, asenapine, clozapine, blonanserin, iloperidone, lurasidone, melperone, nemonapride, olanzapine, paliperidone, perospirone, quetiapine, remoxipride, risperidone, sertindole, trimipramine, ziprasidone, zotepine, alstonie, befeprunox, bitopertin, brexpiprazole, cannabidiol, cariprazine, pimavanserin, pomaglumetad methionil, vabicaserin, xanomeline, and zicronapine.

[0444] Suitable analgesics include, but are not limited to, paracetamol/acetaminophen, nonsteroidal anti-inflammants (e.g. ibuprofen, naproxen, ketoprofen, and nimesulide), COX-2 inhibitors (e.g. rofecoxib, celecoxib, and etoricoxib), opioids (e.g. morphine, codeine, oxycodone, hydrocodone, dihydromorphine, pethidine, buprenorphine), tramadol, norepinephrine, flupiretine, nefopam, orphenadrine, pregabalin, gabapentin, cyclobenzaprine, scopolamine, methadone, ketobemidone, piritramide, and aspirin and related salicylates (e.g. choline salicylate, magnesium salicylate, and sodium salicylate).

[0445] Suitable antispasmodics include, but are not limited to, mebeverine, papaverine, cyclobenzaprine, carisoprodol, orphenadrine, tizanidine, metaxalone, methocarbamol, chlorzoxazone, baclofen, dantrolene, baclofen, tizanidine, and dantrolene. Suitable anti-inflammatories include, but are not limited to, prednisone, non-steroidal anti-inflammants (e.g. ibuprofen, naproxen, ketoprofen, and nimesulide), COX-2 inhibitors (e.g. rofecoxib, celecoxib, and etoricoxib), and immune selective anti-inflammatory derivatives (e.g. submandibular gland peptide-T and its derivatives).

[0446] Suitable anti-histamines include, but are not limited to, H1-receptor antagonists (e.g. acrivastine, azelastine, bilastine, brompheniramine, buclizine, bromodiphenhydramine, carbinoxamine, cetirizine, chlorpromazine, cyclizine, chlorpheniramine, clemastine, cyproheptadine, desloratadine, dexbrompheniramine, dexchlorpheniramine, dimenhydrinate, dimetindene, diphenhydramine, doxylamine, ebastine, embramine, fexofenadine, hydroxyzine, levocetirizine, loratadine, meclozine, mirtazapine, olopatadine, orphenadrine, phenindamine, pheniramine, phenyltoloxamine, promethazine, pyrilamine, quetiapine, rupatadine, tripelennamine, and triprolidine), H2-receptor antagonists (e.g. cimetidine, famotidine, lafutidine, nizatidine, ranitidine, and roxatidine), tritoqualine, catechin, cromoglicate, nedocromil, and p2-adrenergic agonists.

[0447] Suitable anti-infectives include, but are not limited to, amebicides (e.g. nitazoxanide, paromomycin, metronidazole, tinidazole, chloroquine, miltefosine, amphotericin b, and iodoquinol), aminoglycosides (e.g. paromomycin, tobramycin, gentamicin, amikacin, kanamycin, and neomycin), anthelmintics (e.g. pyrantel, mebendazole, ivermectin, praziquantel, albendazole, thiabendazole, oxamniquine), antifungals (e.g. azole antifungals (e.g. itraconazole, fluconazole, parconazole, ketoconazole, clotrimazole, miconazole, and voriconazole), echinocandins (e.g. caspofungin, anidulafungin, and micafungin), griseofulvin, terbinafine, flucytosine, and polyenes (e.g. nystatin, and amphotericin b), antimalarial agents (e.g. pyrimethamine/sulfadoxine, artemether/lumefantrine, atovaquone/proquanil, quinine, hydroxychloroquine, mefloquine, chloroquine, doxycycline, pyrimethamine, and halofantrine), antituberculosis agents (e.g. aminosalicylates (e.g. aminosalicylic acid), isoniazid/rifampin, isoniazid/pyrazinamide/rifampin, bedaquiline, isoniazid, ethambutol, rifampin, rifabutin, rifapentine, capreomycin, and cycloserine), antivirals (e.g. amantadine, rimantadine, abacavir/lamivudine, emtricitabine/tenofovir, cobicistat/elvitegravir/emtricitabine/tenofovir, efavirenz/emtricitabine/tenofovir, abacavir/lamivudine/zidovudine, lamivudine/zidovudine, emtricitabine/tenofovir, emtricitabine/lopinavir/ritonavir/tenofovir, interferon alfa-2v/ribavirin, peginterferon alfa-2b, maraviroc, raltegravir, dolutegravir, enfuvirtide, foscarnet, fomivirsen, oseltamivir, zanamivir, nevirapine, efavirenz, etravirine, rilpivirine, delavirdine, nevirapine, entecavir, lamivudine, adefovir, sofosbuvir, didanosine, tenofovir, abacavir, zidovudine, stavudine, emtricitabine, zalcitabine, telbivudine, simeprevir, boceprevir, telaprevir, lopinavir/ritonavir, boceprevir, darunavir, ritonavir, tipranavir, atazanavir, nelfinavir, amprenavir, indinavir, sawuinavir, ribavirin, valacyclovir, acyclovir, famciclovir, ganciclovir, and valganciclovir), carbapenems (e.g. doripenem, meropenem, ertapenem, and cilastatin/imipenem), cephalosporins (e.g. cefadroxil, cephradine, cefazolin, cephalexin, cefepime, cefazoline, loracarbef, cefotetan, cefuroxime, cefprozil, loracarbef, cefoxitin, cefaclor, ceftibuten, ceftriaxone, cefotaxime, cefpodoxime, cefdinir, cefixime, cefditoren, ceftizoxime, and ceftazidime), glycopeptide antibiotics (e.g. vancomycin, dalbavancin, oritavancin, and telavancin), glycylcyclines (e.g. tigecycline), leprostatics (e.g. clofazimine and thalidomide), lincomycin and derivatives thereof (e.g. clindamycin and lincomycin), macrolides and derivatives thereof (e.g. telithromycin, fidaxomicin, erythromycin, azithromycin, clarithromycin, dirithromycin, and troleandomycin), linezolid, sulfamethoxazole/trimethoprim, rifaximin, chloramphenicol, Fosfomycin, metronidazole, aztreonam, bacitracin, penicillin (amoxicillin, ampicillin, bacampicillin, carbenicillin, piperacillin, ticarcillin, amoxicillin/clavulanate, ampicillin/sulbactam, piperacillin/tazobactam, clavulanate/ticarcillin, penicillin, procaine penicillin, oxacillin, dicloxacillin, and nafcillin), quinolones (e.g. lomefloxacin, norfloxacin, ofloxacin, qatifloxacin, moxifloxacin, ciprofloxacin, levofloxacin, gemifloxacin, moxifloxacin, cinoxacin, nalidixic acid, enoxacin, grepafloxacin, gatifloxacin, trovafloxacin, and sparfloxacin), sulfonamides (e.g. sulfamethoxazole/trimethoprim, sulfasalazine, and sulfasoxazole), tetracyclines (e.g. doxycycline, demeclocycline, minocycline, doxycycline/salicylic acid, doxycycline/omega-3 polyunsaturated fatty acids, and tetracycline), and urinary anti-infectives (e.g. nitrofurantoin, methenamine, Fosfomycin, cinoxacin, nalidixic acid, trimethoprim, and methylene blue).

[0448] Suitable chemotherapeutics include, but are not limited to, paclitaxel, brentuximab vedotin, doxorubicin, 5-FU (fluorouracil), everolimus, pemetrexed, melphalan, pamidronate, anastrozole, exemestane, nelarabine, ofatumumab, bevacizumab, belinostat, tositumomab, carmustine, bleomycin, bosutinib, busulfan, alemtuzumab, irinotecan, vandetanib, bicalutamide, lomustine, daunorubicin, clofarabine, cabozantinib, dactinomycin, ramucirumab, cytarabine, Cytoxan, cyclophosphamide, decitabine, dexamethasone, docetaxel, hydroxyurea, decarbazine, leuprolide, epirubicin, oxaliplatin, asparaginase, estramustine, cetuximab, vismodegib, asparginase Erwinia chrysanthemi, amifostine, etoposide, flutamide, toremifene, fulvestrant, letrozole, degarelix, pralatrexate, methotrexate, floxuridine, obinutuzumab, gemcitabine, afatinib, imatinib mesylatem, carmustine, eribulin, trastuzumab, altretamine, topotecan, ponatinib, idarubicin, ifosfamide, ibrutinib, axitinib, interferon alfa-2a, gefitinib, romidepsin, ixabepilone, ruxolitinib, cabazitaxel, ado-trastuzumab emtansine, carfilzomib, chlorambucil, sargramostim, cladribine, mitotane, vincristine, procarbazine, megestrol, trametinib, mesna, strontium-89 chloride, mechlorethamine, mitomycin, busulfan, gemtuzumab ozogamicin, vinorelbine, filgrastim, pegfilgrastim, sorafenib, nilutamide, pentostatin, tamoxifen, mitoxantrone, pegaspargase, denileukin diftitox, alitretinoin, carboplatin, pertuzumab, cisplatin, pomalidomide, prednisone, aldesleukin, mercaptopurine, zoledronic acid, lenalidomide, rituximab, octretide, dasatinib, regorafenib, histrelin, sunitinib, siltuximab, omacetaxine, thioguanine (tioguanine), dabrafenib, erlotinib, bexarotene, temozolomide, thiotepa, thalidomide, BCG, temsirolimus, bendamustine hydrochloride, triptorelin, aresnic trioxide, lapatinib, valrubicin, panitumumab, vinblastine, bortezomib, tretinoin, azacitidine, pazopanib, teniposide, leucovorin, crizotinib, capecitabine, enzalutamide, ipilimumab, goserelin, vorinostat, idelalisib, ceritinib, abiraterone, epothilone, tafluposide, azathioprine, doxifluridine, vindesine, and all-trans retinoic acid.

[0449] In embodiments where there is an auxiliary active agent contained in the pharmaceutical formulation in addition to the one or more of the polypeptides, polynucleotides, CRISPR-Cas complexes, vectors, cells, virus particles, nanoparticles, other delivery particles, and combinations thereof described herein, amount, such as an effective amount, of the auxiliary active agent will vary depending on the auxiliary active agent. In some embodiments, the amount of the auxiliary active agent ranges from 0.001 micrograms to about 1 milligram. In other embodiments, the amount of the auxiliary active agent ranges from about 0.01 IU to about 1000 IU. In further embodiments, the amount of the auxiliary active agent ranges from 0.001 mL to about 1 mL. In yet other embodiments, the amount of the auxiliary active agent ranges from about 1 w/w to about 50% w/w of the total pharmaceutical formulation. In additional embodiments, the amount of the auxiliary active agent ranges from about 1% v/v to about 50% v/v of the total pharmaceutical formulation. In still other embodiments, the amount of the auxiliary active agent ranges from about 1% w/v to about 50% w/v of the total pharmaceutical formulation.

### Dosage Forms

[0450] In some embodiments, the pharmaceutical formulations described herein may be in a dosage form. The dosage forms can be adapted for administration by any appropriate route. Appropriate routes include, but are not limited to, oral (including buccal or sublingual), rectal, epidural, intracranial, intraocular, inhaled, intranasal, topical (including buccal, sublingual, or transdermal), vaginal, intraurethral, parenteral, intracranial, subcutaneous, intramuscular, intravenous, intraperitoneal, intradermal, intraosseous, intracardiac, intraarticular, intracavernous, intrathecal, intravitreal, intracerebral, gingival, subgingival, intracerebroventricular, and intradermal. Such formulations may be prepared by any method known in the art.

[0451] Dosage forms adapted for oral administration can be discrete dosage units such as capsules, pellets or tablets, powders or granules, solutions, or suspensions in aqueous or non-aqueous liquids; edible foams or whips, or in oil-in-water liquid emulsions or water-in-oil liquid emulsions. In some embodiments, the pharmaceutical formulations adapted for oral administration also include one or more agents which flavor, preserve, color, or help disperse the pharmaceutical formulation. Dosage forms prepared for oral administration can also be in the form of a liquid solution that can be delivered as foam, spray, or liquid solution. In some embodiments, the oral dosage form can contain about 1 ng to 1000 g of a pharmaceutical formulation containing a therapeutically effective amount or an appropriate fraction thereof of the targeted effector fusion protein and/or complex thereof or composition containing the one or more of the polypeptides, polynucleotides, vectors, cells, and combinations thereof described herein. The oral dosage form can be administered to a subject in need thereof.

[0452] Where appropriate, the dosage forms described herein can be microencapsulated.

[0453] The dosage form can also be prepared to prolong or sustain the release of any ingredient. In some embodiments, the one or more of the polypeptides, polynucleotides, vectors, cells, and combinations thereof described herein can be the ingredient whose release is delayed. In other embodiments, the release of an optionally included auxiliary ingredient is delayed. Suitable methods for delaying the release of an ingredient include, but are not limited to, coating or embedding the ingredients in material in polymers, wax, gels, and the like. Delayed release dosage formulations can be prepared as described in standard references such as “Pharmaceutical dosage form tablets,” eds. Liberman et. al. (New York, Marcel Dekker, Inc., 1989), “Remington —The science and practice of pharmacy”, 20th ed., Lippincott Williams & Wilkins, Baltimore, Md., 2000, and “Pharmaceutical dosage forms and drug delivery systems”, 6th Edition, Ansel et al., (Media, P A: Williams and Wilkins, 1995). These references provide information on excipients, materials, equipment, and processes for preparing tablets and capsules and delayed release dosage forms of tablets and pellets, capsules, and granules. The delayed release can be anywhere from about an hour to about 3 months or more.

[0454] Examples of suitable coating materials include, but are not limited to, cellulose polymers such as cellulose acetate phthalate, hydroxypropyl cellulose, hydroxypropyl methylcellulose, hydroxypropyl methylcellulose phthalate, and hydroxypropyl methylcellulose acetate succinate; polyvinyl acetate phthalate, acrylic acid polymers and copolymers, and methacrylic resins that are commercially available under the trade name EUDRAGIT® (Roth Pharma, Westerstadt, Germany), zein, shellac, and polysaccharides.

[0455] Coatings may be formed with a different ratio of water-soluble polymer, water insoluble polymers, and/or pH dependent polymers, with or without water insoluble/water soluble non-polymeric excipient, to produce the desired release profile. The coating is either performed on the dosage form (matrix or simple) which includes, but is not limited to, tablets (compressed with or without coated beads), capsules (with or without coated beads), beads, particle compositions, “ingredient as is” formulated as, but not limited to, suspension form or as a sprinkle dosage form.

[0456] Dosage forms adapted for topical administration can be formulated as ointments, creams, suspensions, lotions, powders, solutions, pastes, gels, sprays, aerosols, or oils. In some embodiments for treatments of the eye or other external tissues, for example the mouth or the skin, the pharmaceutical formulations are applied as a topical ointment or cream. When formulated in an ointment, the one or more of the polypeptides, polynucleotides, vectors, cells, and combinations thereof described herein can be formulated with a paraffinic or water-miscible ointment base. In some embodiments, the active ingredient can be formulated in a cream with an oil-in-water cream base or a water-in-oil base. Dosage forms adapted for topical administration in the mouth include lozenges, pastilles, and mouth washes.

[0457] Dosage forms adapted for nasal or inhalation administration include aerosols, solutions, suspension drops, gels, or dry powders. In some embodiments, the one or more of the polypeptides, polynucleotides, vectors, cells, and combinations thereof described herein is contained in a dosage form adapted for inhalation is in a particle-size-reduced form that is obtained or obtainable by micronization. In some embodiments, the particle size of the size reduced (e.g. micronized) compound or salt or solvate thereof, is defined by a D50 value of about 0.5 to about 10 microns as measured by an appropriate method known in the art. Dosage forms adapted for administration by inhalation also include particle dusts or mists. Suitable dosage forms wherein the carrier or excipient is a liquid for administration as a nasal spray or drops include aqueous or oil solutions/suspensions of an active ingredient (e.g. the one or more of the polypeptides, polynucleotides, vectors, cells, and combinations thereof described herein and/or auxiliary active agent), which may be generated by various types of metered dose pressurized aerosols, nebulizers, or insufflators.

[0458] In some embodiments, the dosage forms can be aerosol formulations suitable for administration by inhalation. In some of these embodiments, the aerosol formulation can contain a solution or fine suspension of the one or more of the polypeptides, polynucleotides, vectors, cells, and combinations thereof described herein and a pharmaceutically acceptable aqueous or non-aqueous solvent. Aerosol formulations can be presented in single or multi-dose quantities in sterile form in a sealed container. For some of these embodiments, the sealed container is a single dose or multi-dose nasal or an aerosol dispenser fitted with a metering valve (e.g. metered dose inhaler), which is intended for disposal once the contents of the container have been exhausted.

[0459] Where the aerosol dosage form is contained in an aerosol dispenser, the dispenser contains a suitable propellant under pressure, such as compressed air, carbon dioxide, or an organic propellant, including but not limited to a hydrofluorocarbon. The aerosol formulation dosage forms in other embodiments are contained in a pump-atomizer. The pressurized aerosol formulation can also contain a solution or a suspension of one or more of the polypeptides, polynucleotides, vectors, cells, and combinations thereof described herein. In further embodiments, the aerosol formulation can also contain co-solvents and/or modifiers incorporated to improve, for example, the stability and/or taste and/or fine particle mass characteristics (amount and/or profile) of the formulation. Administration of the aerosol formulation can be once daily or several times daily, for example 2, 3, 4, or 8 times daily, in which 1, 2, or 3 doses are delivered each time.

[0460] For some dosage forms suitable and/or adapted for inhaled administration, the pharmaceutical formulation is a dry powder inhalable formulation. In addition to the one or more of the polypeptides, polynucleotides, vectors, cells, and combinations thereof described herein, an auxiliary active ingredient, and/or pharmaceutically acceptable salt thereof, such a dosage form can contain a powder base such as lactose, glucose, trehalose, manitol, and/or starch. In some of these embodiments, the one or more of the polypeptides, polynucleotides, vectors, cells, and combinations thereof described herein is in a particle-size reduced form. In further embodiments, a performance modifier, such as L-leucine or another amino acid, cellobiose octaacetate, and/or metals salts of stearic acid, such as magnesium or calcium stearate.

[0461] In some embodiments, the aerosol dosage forms can be arranged so that each metered dose of aerosol contains a predetermined amount of an active ingredient, such as the one or more of the one or more of the polypeptides, polynucleotides, vectors, cells, and combinations thereof described herein.

[0462] Dosage forms adapted for vaginal administration can be presented as pessaries, tampons, creams, gels, pastes, foams, or spray formulations. Dosage forms adapted for rectal administration include suppositories or enemas.

[0463] Dosage forms adapted for parenteral administration and/or adapted for any type of injection (e.g. intravenous, intraperitoneal, subcutaneous, intramuscular, intradermal, intraosseous, epidural, intracardiac, intraarticular, intracavernous, gingival, subginigival, intrathecal, intravireal, intracerebral, and intracerebroventricular) can include aqueous and/or non-aqueous sterile injection solutions, which can contain anti-oxidants, buffers, bacteriostats, solutes that render the composition isotonic with the blood of the subject, and aqueous and non-aqueous sterile suspensions, which can include suspending agents and thickening agents. The dosage forms adapted for parenteral administration can be presented in a single-unit dose or multi-unit dose containers, including but not limited to sealed ampoules or vials. The doses can be lyophilized and resuspended in a sterile carrier to reconstitute the dose prior to administration. Extemporaneous injection solutions and suspensions can be prepared in some embodiments, from sterile powders, granules, and tablets.

[0464] Dosage forms adapted for ocular administration can include aqueous and/or nonaqueous sterile solutions that can optionally be adapted for injection, and which can optionally contain anti-oxidants, buffers, bacteriostats, solutes that render the composition isotonic with the eye or fluid contained therein or around the eye of the subject, and aqueous and nonaqueous sterile suspensions, which can include suspending agents and thickening agents.

[0465] For some embodiments, the dosage form contains a predetermined amount of the one or more of the polypeptides, polynucleotides, vectors, cells, and combinations thereof described herein per unit dose. In some embodiments, the predetermined amount of the Such unit doses may therefore be administered once or more than once a day. Such pharmaceutical formulations may be prepared by any of the methods well known in the art.

### Kits

[0466] Also described herein are kits that contain one or more of the one or more of the polypeptides, polynucleotides, vectors, cells, or other components described herein and combinations thereof and pharmaceutical formulations described herein. In embodiments, one or more of the polypeptides, polynucleotides, vectors, cells, and combinations thereof described herein can be presented as a combination kit. As used herein, the terms “combination kit” or “kit of parts” refers to the compounds, or formulations and additional components that are used to package, screen, test, sell, market, deliver, and/or administer the combination of elements or a single element, such as the active ingredient, contained therein. Such additional components include but are not limited to, packaging, syringes, blister packages, bottles, and the like. The combination kit can contain one or more of the components (e.g. one or more of the one or more of the polypeptides, polynucleotides, vectors, cells, and combinations thereof) or formulation thereof can be provided in a single formulation (e.g. a liquid, lyophilized powder, etc.), or in separate formulations. The separate components or formulations can be contained in a single package or in separate packages within the kit. The kit can also include instructions in a tangible medium of expression that can contain information and/or directions regarding the content of the components and/or formulations contained therein, safety information regarding the content of the components(s) and/or formulation(s) contained therein, information regarding the amounts, dosages, indications for use, screening methods, component design recommendations and/or information, recommended treatment regimen(s) for the components(s) and/or formulations contained therein. As used herein, “tangible medium of expression” refers to a medium that is physically tangible or accessible and is not a mere abstract thought or an unrecorded spoken word. “Tangible medium of expression” includes, but is not limited to, words on a cellulosic or plastic material, or data stored in a suitable computer readable memory form. The data can be stored on a unit device, such as a flash memory drive or CD-ROM or on a server that can be accessed by a user via, e.g. a web interface.

[0467] In one embodiment, the invention provides a kit comprising one or more of the components described herein. In some embodiments, the kit comprises a vector system and instructions for using the kit. In some embodiments, the vector system includes a regulatory element operably linked to one or more engineered delivery system polynucleotides as described elsewhere herein and, optionally, a cargo molecule, which can optionally be operably linked to a regulatory element. The one or more engineered delivery system polynucleotides can be included on the same or different vectors as the cargo molecule in embodiments containing a cargo molecule within the kit.

[0468] In some embodiments, the kit comprises a vector system and instructions for using the kit. In some embodiments, the vector system comprises (a) a first regulatory element operably linked to a direct repeat sequence and one or more insertion sites for inserting one or more guide sequences up- or downstream (whichever applicable) of the direct repeat sequence, wherein when expressed, the guide sequence directs sequence-specific binding of a Cas9 CRISPR complex to a target sequence in a eukaryotic cell, wherein the Cas9 CRISPR complex comprises a Cas9 enzyme complexed with the guide sequence that is hybridized to the target sequence; and/or (b) a second regulatory element operably linked to an enzyme-coding sequence encoding said Cas9 enzyme comprising a nuclear localization sequence. Where applicable, a tracr sequence may also be provided. In some embodiments, the kit comprises components (a) and (b) located on the same or different vectors of the system. In some embodiments, component (a) further comprises two or more guide sequences operably linked to the first regulatory element, wherein when expressed, each of the two or more guide sequences direct sequence specific binding of a CRISPR complex to a different target sequence in a eukaryotic cell. In some embodiments, the Cas9 enzyme comprises one or more nuclear localization sequences of sufficient strength to drive accumulation of said CRISPR enzyme in a detectable amount in the nucleus of a eukaryotic cell. In some embodiments, the CRISPR enzyme is a type V or VI CRISPR system enzyme. In some embodiments, the CRISPR enzyme is a Cas9 enzyme. In some embodiments, the Cas9 enzyme is derived from Francisella tularensis 1, Francisella tularensis subsp. novicida, Prevotella albensis, Lachnospiraceae bacterium MC2017 1, Butyrivibrio proteoclasticus, Peregrinibacteria bacterium GW2011_GWA2_33_10, Parcubacteria bacterium GW2011_GWC2_44_17, Smithella sp. SCADC, Acidaminococcus sp. BV3L6, Lachnospiraceae bacterium MA2020, Candidatus Methanoplasma termitum, Eubacterium eligens, Moraxella bovoculi 237, Leptospira inadai, Lachnospiraceae bacterium ND2006, Porphyromonas crevioricanis 3, Prevotella disiens, or Porphyromonas macacae Cas9 (e.g., modified to have or be associated with at least one DD), and may include further alteration or mutation of the Cas9, and can be a chimeric Cas9. In some embodiments, the DD-CRISPR enzyme is codon-optimized for expression in a eukaryotic cell. In some embodiments, the DD-CRISPR enzyme directs cleavage of one or two strands at the location of the target sequence. In some embodiments, the DD-CRISPR enzyme lacks or substantially DNA strand cleavage activity (e.g., no more than 5% nuclease activity as compared with a wild type enzyme or enzyme not having the mutation or alteration that decreases nuclease activity). In some embodiments, the first regulatory element is a polymerase III promoter. In some embodiments, the second regulatory element is a polymerase II promoter. In some embodiments, the guide sequence is at least 16, 17, 18, 19, 20, 25 nucleotides, or between 16-30, or between 16-25, or between 16-20 nucleotides in length.

### Methods of Using the Engineered AAV Capsid Variants, Virus Particles, Cells, and Formulations Thereof

### General Discussion

[0469] The engineered AAV capsid system polynucleotides, polypeptides, vector(s), engineered cells, engineered AAV capsid particles can be used generally to package and/or deliver one or more cargo polynucleotides to a recipient cell. In some embodiments, delivery is done in cell-specific manner based upon the tropism of the engineered AAV capsid. In some embodiments, engineered AAV capsid particles can be administered to a subject or a cell, tissue, and/or organ and facilitate the transfer and/or integration of the cargo polynucleotide to the recipient cell. In other embodiments, engineered cells capable of producing engineered AAV capsid particles can be generated from engineered AAV capsid system molecules (e.g. polynucleotides, vectors, and vector systems, etc.). In some embodiments, the engineered AAV capsid molecules can be delivered to a subject or a cell, tissue, and/or organ. When delivered to a subject, they engineered delivery system molecule(s) can transform a subject's cell in vivo or ex vivo to produce an engineered cell that can be capable of making an engineered AAV capsid particles, which can be released from the engineered cell and deliver cargo molecule(s) to a recipient cell in vivo or produce personalized engineered AAV capsid particles for reintroduction into the subject from which the recipient cell was obtained. In some embodiments, an engineered cell can be delivered to a subject, where it can release produced engineered AAV capsid particles such that they can then deliver a cargo polynucleotide(s) to a recipient cell. These general processes can be used in a variety of ways to treat and/or prevent disease or a symptom thereof in a subject, generate model cells, generate modified organisms, provide cell selection and screening assays, in bioproduction, and in other various applications.

[0470] In some embodiments, the engineered AAV capsid polynucleotides, vectors, and systems thereof can be used to generate engineered AAV capsid variant libraries that can be mined for variants with a desired cell-specificity. The description provided herein as supported by the various Examples can demonstrate that one having a desired cell-specificity in mind could utilize the present invention as described herein to obtain a capsid with the desired cell-specificity.

[0471] The subject invention may be used as part of a research program wherein there is transmission of results or data. A computer system (or digital device) may be used to receive, transmit, display and/or store results, analyze the data and/or results, and/or produce a report of the results and/or data and/or analysis. A computer system may be understood as a logical apparatus that can read instructions from media (e.g. software) and/or network port (e.g. from the internet), which can optionally be connected to a server having fixed media. A computer system may comprise one or more of a CPU, disk drives, input devices such as keyboard and/or mouse, and a display (e.g. a monitor). Data communication, such as transmission of instructions or reports, can be achieved through a communication medium to a server at a local or a remote location. The communication medium can include any means of transmitting and/or receiving data. For example, the communication medium can be a network connection, a wireless connection, or an internet connection. Such a connection can provide for communication over the World Wide Web. It is envisioned that data relating to the present invention can be transmitted over such networks or connections (or any other suitable means for transmitting information, including but not limited to mailing a physical report, such as a print-out) for reception and/or for review by a receiver. The receiver can be but is not limited to an individual, or electronic system (e.g. one or more computers, and/or one or more servers). In some embodiments, the computer system comprises one or more processors. Processors may be associated with one or more controllers, calculation units, and/or other units of a computer system, or implanted in firmware as desired. If implemented in software, the routines may be stored in any computer readable memory such as in RAM, ROM, flash memory, a magnetic disk, a laser disk, or other suitable storage medium. Likewise, this software may be delivered to a computing device via any known delivery method including, for example, over a communication channel such as a telephone line, the internet, a wireless connection, etc., or via a transportable medium, such as a computer readable disk, flash drive, etc. The various steps may be implemented as various blocks, operations, tools, modules and techniques which, in turn, may be implemented in hardware, firmware, software, or any combination of hardware, firmware, and/or software. When implemented in hardware, some or all of the blocks, operations, techniques, etc. may be implemented in, for example, a custom integrated circuit (IC), an application specific integrated circuit (ASIC), a field programmable logic array (FPGA), a programmable logic array (PLA), etc. A client-server, relational database architecture can be used in embodiments of the invention. A client-server architecture is a network architecture in which each computer or process on the network is either a client or a server. Server computers are typically powerful computers dedicated to managing disk drives (file servers), printers (print servers), or network traffic (network servers). Client computers include PCs (personal computers) or workstations on which users run applications, as well as example output devices as disclosed herein. Client computers rely on server computers for resources, such as files, devices, and even processing power. In some embodiments of the invention, the server computer handles all of the database functionality. The client computer can have software that handles all the front-end data management and can also receive data input from users. A machine readable medium comprising computer-executable code may take many forms, including but not limited to, a tangible storage medium, a carrier wave medium or physical transmission medium. Non-volatile storage media include, for example, optical or magnetic disks, such as any of the storage devices in any computer(s) or the like, such as may be used to implement the databases, etc. shown in the drawings. Volatile storage media include dynamic memory, such as main memory of such a computer platform. Tangible transmission media include coaxial cables; copper wire and fiber optics, including the wires that comprise a bus within a computer system. Carrier-wave transmission media may take the form of electric or electromagnetic signals, or acoustic or light waves such as those generated during radio frequency (RF) and infrared (IR) data communications. Common forms of computer-readable media therefore include for example: a floppy disk, a flexible disk, hard disk, magnetic tape, any other magnetic medium, a CD-ROM, DVD or DVD-ROM, any other optical medium, punch cards paper tape, any other physical storage medium with patterns of holes, a RAM, a ROM, a PROM and EPROM, a FLASH-EPROM, any other memory chip or cartridge, a carrier wave transporting data or instructions, cables or links transporting such a carrier wave, or any other medium from which a computer may read programming code and/or data. Many of these forms of computer readable media may be involved in carrying one or more sequences of one or more instructions to a processor for execution. Accordingly, the invention comprehends performing any method herein-discussed and storing and/or transmitting data and/or results therefrom and/or analysis thereof, as well as products from performing any method herein-discussed, including intermediates.

### Therapeutics

[0472] In some embodiments, one or more molecules of the engineered delivery system, engineered AAV capsid particles, engineered cells, and/or formulations thereof described herein can be delivered to a subject in need thereof as a therapy for one or more diseases. In some embodiments, the disease to be treated is a genetic or epigenetic based disease. In some embodiments, the disease to be treated is not a genetic or epigenetic based disease. In some embodiments, one or more molecules of the engineered delivery system, engineered AAV capsid particles, engineered cells, and/or formulations thereof described herein can be delivered to a subject in need thereof as a treatment or prevention (or as a part of a treatment or prevention) of a disease. It will be appreciated that the specific disease to be treated and/or prevented by delivery of an engineered cell and/or engineered can be dependent on the cargo molecule packaged into an engineered AAV capsid particle.

[0473] Genetic diseases that can be treated are discussed in greater detail elsewhere herein (see e.g. discussion on Gene-modification based-therapies below). Other diseases include but are not limited to any of the following: cancer, Acubetivacter infections, actinomycosis, African sleeping sickness, AIDS/HIV, ameobiasis, Anaplasmosis, Angiostrongyliasis, Anisakiasis, Anthrax, Acranobacterium haemolyticum infection, Argentine hemorrhagic fever, Ascariasis, Aspergillosis, Astrovirus infection, Babesiosis, Bacterial meningitis, Bacterial pneumonia, Bacterial vaginosis, Bacteroides infection, balantidiasis, Bartonellosis, Baylisascaris infection, BK virus infection, Black Piedra, Blastocytosis, Blastomycosis, Bolivian hemorrhagic fever, Botulism, Brazilian hemorrhagic fever, brucellosis, Bubonic plague, Burkholderia infection, buruli ulcer, calicivirus invention, campylobacteriosis, Candidasis, Capillariasis, Carrion's disease, Cat-scratch disease, cellulitis, Chagas Disease, Chancroid, Chickenpox, Chikungunya, Chlamydia, Chlamydia pneumoniae, Cholera, Chromoblastomycosis, Chytridiomycosis, Clonochiasis, Clostridium difficile colitis, Coccidioidomycosis, Colorado tick fever, rhinovirus/coronavirus invection (common cold), Cretzfeldt-Jakob disease, Crimean-congo hemorrhagic fever, Cryptococcosis, Cryptosporidosis, Cutaneous larva migrans (CLM), cyclosporiasis, cysticercosis, cytomegalovirus infection, Dengue fever, Desmodesmus infection, Dientamoebiasis, Diphtheria, Diphylobothriasis, Dracunculiasis, Ebola, Echinococcosis, Ehrlichiosis, Enterobiasis, Enterococcus infection, Enterovirus infection, Epidemic typhus, Erthemia Infectisoum, Exanthem subitum, Fasciolasis, Fasciolopsiasis, fatal familial insomnia, filarisis, Clostridum perfingens infection, Fusobacterium infection, Gas gangrene (clostridial myonecrosis), Geotrichosis, Gerstmann-Straussler-Scheinker syndrome, Giardasis, Glanders, Gnathostomiasis, Gonorrhea, Granuloma inguinales, Group A streptococcal infection, Group B streptococcal infection, Haemophilus influenzae infection, Hand, foot, and mouth disease, hanta virus pulmonary syndrome, heartland virus disease, Helicobacter pylori infection, hemorrhagi fever with renal syndrome, Hendra virus infection, Hepatitis (all groups A, B, C, D, E), herpes simplex, histoplasmosis, hookworm infection, human bocavirus infection, human ewingii erlichosis, Human granulocytic anaplasmosis, human metapneymovirus infection, human monocytic ehrlichosis, human papilloma virus, Hymenolepiasis, Epstein-Barr infection, mononucleosis, influenza, isoporisis, Kawasaki disease, Kingell kingae infection, Kuru, Lasas fever, Leginollosis (Legionnaires disease and Potomac Fever), Leishmaniasis, Leprosy, Leptospirosis, Listeriosis, Lyme disease, lymphatic filariasis, lymphocytic choriomeningitis, Malaria, Marburg hemorrhagic fever, measles, Middle East respiratory syndrome, Melioidosis, meningitis, Meningococcal disease, Metagonimiasis, Microsporidosis, Molluscum contagiosum, Monkeypox, Mumps, Murine typhus, Mycoplasma pneumonia, Mycoplasma genitalium infection, Mycetoma, Myiasis, Conjunctivitis, Nipah virus infection, Norovirus, Variant Creutzfeldt-Jakob disease, Nocardosis, Onchocerciasis, Opisthorchiasis, Paracoccidioidomycosis, Paragonimiasis, Pasteurellosis, Pdiculosisi capitis, Pediculosis corporis, Pediculosis pubis, pelvic inflammatory disease, pertussis, plague, pneumococcal infection, pneumocystis pneumonia, pneumonia, poliomyelitis, prevotella infection, primary amoebic meningoencephalitis, progressive multifocal leukoencephalopathy, Psittacosis, Qfever, rabies, relapsing fever, respiratory syncytial virus infection, rhinovirus infection, rickettsial infection, Rickettsialpox, Rift Valley Fever, Rocky Mountain Spotted Fever, Rotavirus infection, Rubella, Salmonellosis, SARS, Scabies, Scarlet fever, Schistosomiasis, Sepsis, Shigellosis, Shingles, Smallpox, Sporotrichosis, Staphylococcal infection (including MRSA), strongyloidiasis, subacute sclerosing panencephalitis, Syphilis, Taeniasis, tetanus, Trichophyton species infection, Tocariasis, Toxoplasmosis, Trachoma, Trichinosis, Trichuriasis, Tuberculosis, Tularemia, Typhoid Fever, Typhus Fever, Ureaplasma urealyticum infection, Valley fever, Venezuelan equine encephalitis, Venezuelan hemorrhagic fever, Vibrio species infection, Viral pneumonia, West Nile Fever, White Piedra, Yersinia pseudotuberculosis, Yersiniosis, Yellow fever, Zeaspora, Zika fever, Zygomycosis and combinations thereof.

[0474] Other diseases and disorders that can be treated using embodiments of the present invention include, but are not limited to, endocrine diseases (e.g. Type I and Type II diabetes, gestational diabetes, hypoglycemia. Glucagonoma, Goiter, Hyperthyroidism, hypothyroidism, thyroiditis, thyroid cancer, thyroid hormone resistance, parathyroid gland disorders, Osteoporosis, osteitis deformans, rickets, ostomalacia, hypopituitarism, pituitary tumors, etc.), skin conditions of infections and non-infectious origin, eye diseases of infectious or non-infectious origin, gastrointestinal disorders of infectious or non-infectious origin, cardiovascular diseases of infectious or non-infectious origin, brain and neuron diseases of infectious or non-infectious origin, nervous system diseases of infectious or non-infectious origin, muscle diseases of infectious or non-infectious origin, bone diseases of infectious or non-infectious origin, reproductive system diseases of infectious or non-infectious origin, renal system diseases of infectious or non-infectious origin, blood diseases of infectious or non-infectious origin, lymphatic system diseases of infectious or non-infectious origin, immune system diseases of infectious or non-infectious origin, mental-illness of infectious or non-infectious origin and the like.

[0475] In some embodiments, the disease to be treated is a muscle or muscle related disease or disorder, such as a genetic muscle disease or disorder.

[0476] Other diseases and disorders will be appreciated by those of skill in the art.

### Adoptive Cell Therapies

[0477] Generally speaking, adoptive cell transfer involves the transfer of cells (autologous, allogeneic, and/or xenogeneic) to a subject. The cells, may or may not be, modified and/or otherwise manipulated prior to delivery to the subject.

[0478] In some embodiments, an engineered cell as described herein can be included in an adoptive cell transfer therapy. In some embodiments, an engineered cell as described herein can be delivered to a subject in need thereof. In some embodiments, the cell can be isolated from a subject, manipulated in vitro such that it is capable of generating an engineered AAV capsid particle described herein to produce an engineered cell and delivered back to the subject in an autologous manner or to a different subject in an allogeneic or xenogeneic manner. The cell isolated, manipulated, and/or delivered can be a eukaryotic cell. The cell isolated, manipulated, and/or delivered can be a stem cell. The cell isolated, manipulated, and/or delivered can be a differentiated cell. The cell isolated, manipulated, and/or delivered can be an immune cell, a blood cell, an endocrine cell, a renal cell, an exocrine cell, a nervous system cell, a vascular cell, a muscle cell, a urinary system cell, a bone cell, a soft tissue cell, a cardiac cell, a neuron, or an integumentary system cell. Other specific cell types will instantly be appreciated by one of ordinary skill in the art.

[0479] In some embodiments, the isolated cell can be manipulated such that it becomes an engineered cell as described elsewhere herein (e.g. contain and/or express one or more engineered delivery system molecules or vectors described elsewhere herein). Methods of making such engineered cells are described in greater detail elsewhere herein.

[0480] The administration of the cells or population of cells according to the present invention may be carried out in any convenient manner, including by aerosol inhalation, injection, ingestion, transfusion, implantation or transplantation. The cells or population of cells may be administered to a patient subcutaneously, intradermally, intratumorally, intranodally, intramedullary, intramuscularly, by intravenous or intralymphatic injection, or intraperitoneally. In one embodiment, the cell compositions of the present invention are preferably administered by intravenous injection.

[0481] The administration of the cells or population of cells can be or involve the administration of 10⁴-10⁹ cells per kg body weight including all integer values of cell numbers within those ranges. In some embodiments, 10⁵ to 10⁶ cells/kg are delivered Dosing in adoptive cell therapies may for example involve administration of from 10⁶ to 10⁹ cells/kg, with or without a course of lymphodepletion, for example with cyclophosphamide. The cells or population of cells can be administrated in one or more doses. In another embodiment, the effective amount of cells are administrated as a single dose. In another embodiment, the effective amount of cells are administrated as more than one dose over a period time. Timing of administration is within the judgment of managing physician and depends on the clinical condition of the patient. The cells or population of cells may be obtained from any source, such as a blood bank or a donor. While individual needs vary, determination of optimal ranges of effective amounts of a given cell type for a particular disease or conditions are within the skill of one in the art. An effective amount means an amount which provides a therapeutic or prophylactic benefit. The dosage administrated will be dependent upon the age, health and weight of the recipient, kind of concurrent treatment, if any, frequency of treatment and the nature of the effect desired.

[0482] In another embodiment, the effective amount of cells or composition comprising those cells are administrated parenterally. The administration can be an intravenous administration. The administration can be directly done by injection within a tissue. In some embodiments, the tissue can be a tumor.

[0483] To guard against possible adverse reactions, engineered cells can be equipped with a transgenic safety switch, in the form of a transgene that renders the cells vulnerable to exposure to a specific signal. For example, the herpes simplex viral thymidine kinase (TK) gene may be used in this way, for example by introduction into the engineered cell similar to that discussed in Greco, et al., Improving the safety of cell therapy with the TK-suicide gene. Front. Pharmacol. 2015; 6: 95. In such cells, administration of a nucleoside prodrug such as ganciclovir or acyclovir causes cell death. Alternative safety switch constructs include inducible caspase 9, for example triggered by administration of a small-molecule dimerizer that brings together two nonfunctional icasp9 molecules to form the active enzyme. A wide variety of alternative approaches to implementing cellular proliferation controls have been described (see U.S. Patent Publication No. 20130071414; PCT Patent Publication WO2011146862; PCT Patent Publication WO2014011987; PCT Patent Publication WO2013040371; Zhou et al. BLOOD, 2014, 123/25:3895—3905; Di Stasi et al., The New England Journal of Medicine 2011; 365:1673-1683; Sadelain M, The New England Journal of Medicine 2011; 365:1735-173; Ramos et al., Stem Cells 28(6):1107-15 (2010)).

[0484] Methods of modifying isolated cells to obtain the engineered cells with the desired properties are described elsewhere herein. In some embodiments, the methods can include genome modification, including, but not limited to, genome editing using a CRISPR-Cas system to modify the cell. This can be in addition to introduction of an engineered AAV capsid system molecule describe elsewhere herein.

[0485] Allogeneic cells are rapidly rejected by the host immune system. It has been demonstrated that, allogeneic leukocytes present in non-irradiated blood products will persist for no more than 5 to 6 days (Boni, Muranski et al. 2008 Blood 1; 112(12):4746-54). Thus, to prevent rejection of allogeneic cells, the host's immune system usually has to be suppressed to some extent. However, in the case of adoptive cell transfer the use of immunosuppressive drugs also have a detrimental effect on the introduced therapeutic cells, such as engineered cells described herein. Therefore, to effectively use an adoptive immunotherapy approach in these conditions, the introduced cells would need to be resistant to the immunosuppressive treatment. Thus, in a particular embodiment, the present invention further comprises a step of modifying the engineered cells to make them resistant to an immunosuppressive agent, preferably by inactivating at least one gene encoding a target for an immunosuppressive agent. An immunosuppressive agent is an agent that suppresses immune function by one of several mechanisms of action. An immunosuppressive agent can be, but is not limited to a calcineurin inhibitor, a target of rapamycin, an interleukin-2 receptor α-chain blocker, an inhibitor of inosine monophosphate dehydrogenase, an inhibitor of dihydrofolic acid reductase, a corticosteroid or an immunosuppressive antimetabolite. The present invention allows conferring immunosuppressive resistance to engineered cells for adoptive cell therapy by inactivating the target of the immunosuppressive agent in engineered cells. As non-limiting examples, targets for an immunosuppressive agent can be a receptor for an immunosuppressive agent such as: CD52, glucocorticoid receptor (GR), a FKBP family gene member and a cyclophilin family gene member.

[0486] Immune checkpoints are inhibitory pathways that slow down or stop immune reactions and prevent excessive tissue damage from uncontrolled activity of immune cells. In certain embodiments, the immune checkpoint targeted is the programmed death-1 (PD-1 or CD279) gene (PDCD1). In other embodiments, the immune checkpoint targeted is cytotoxic T-lymphocyte-associated antigen (CTLA-4). In additional embodiments, the immune checkpoint targeted is another member of the CD28 and CTLA4 Ig superfamily such as BTLA, LAG3, ICOS, PDL1 or MR. In further additional embodiments, the immune checkpoint targeted is a member of the TNFR superfamily such as CD40, OX40, CD137, GITR, CD27 or TIM-3.

[0487] Additional immune checkpoints include Src homology 2 domain-containing protein tyrosine phosphatase 1 (SHP-1) (Watson H A, et al., SHP-1: the next checkpoint target for cancer immunotherapy? Biochem Soc Trans. 2016 Apr 15; 44(2):356-62). SHP-1 is a widely expressed inhibitory protein tyrosine phosphatase (PTP). In T-cells, it is a negative regulator of antigen-dependent activation and proliferation. It is a cytosolic protein, and therefore not amenable to antibody-mediated therapies, but its role in activation and proliferation makes it an attractive target for genetic manipulation in adoptive transfer strategies, such as chimeric antigen receptor (CAR) T cells. Immune checkpoints may also include T cell immunoreceptor with Ig and ITIM domains (TIGITNstm3/WUCAM/VSIG9) and VISTA (Le Mercier I, et al., (2015) Beyond CTLA-4 and PD-1, the generation Z of negative checkpoint regulators. Front. Immunol. 6:418).

[0488] International Patent Publication No. WO2014172606 relates to the use of MT1 and/or MT1 inhibitors to increase proliferation and/or activity of exhausted CD8+ T-cells and to decrease CD8+ T-cell exhaustion (e.g., decrease functionally exhausted or unresponsive CD8+ immune cells). In certain embodiments, metallothioneins are targeted by gene editing in adoptively transferred T cells.

[0489] In certain embodiments, targets of gene editing may be at least one targeted locus involved in the expression of an immune checkpoint protein. Such targets may include, but are not limited to CTLA4, PPP2CA, PPP2CB, PTPN6, PTPN22, PDCD1, ICOS (CD278), PDL1, KIR, LAG3, HAVCR2, BTLA, CD160, TIGIT, CD96, CRTAM, LAIR1, SIGLEC7, SIGLEC9, CD244 (2B4), TNFRSF10B, TNFRSF10A, CASP8, CASP10, CASP3, CASP6, CASP7, FADD, FAS, TGFBRII, TGFRBRI, SMAD2, SMAD3, SMAD4, SMAD10, SKI, SKIL, TGIF1, IL10RA, IL10RB, HMOX2, IL6R, IL6ST, EIF2AK4, CSK, PAG1, SIT1, FOXP3, PRDM1, BATF, VISTA, GUCY1A2, GUCY1A3, GUCY1B2, GUCY1B3, MT1, MT2, CD40, OX40, CD137, GITR, CD27, SHP-1 or TIM-3. In some embodiments, the gene locus involved in the expression of PD-1 or CTLA-4 genes is targeted. In some embodiments, combinations of genes are targeted, such as but not limited to PD-1 and TIGIT.

[0490] In some embodiments, at least two genes are edited. Pairs of genes may include, but are not limited to PD1 and TCRα, PD1 and TCRβ, CTLA-4 and TCRα, CTLA-4 and TCRβ, LAG3 and TCRα, LAG3 and TCRβ, Tim3 and TCRa, Tim3 and TCRβ, BTLA and TCRα, BTLA and TCRβ, BY55 and TCRα, BY55 and TCRβ, TIGIT and TCRα, TIGIT and TCRβ, B7H5 and TCRα, B7H5 and TCRβ, LAIR1 and TCRα, LAIR1 and TCRβ, SIGLEC10 and TCRα, SIGLEC10 and TCRβ, 2B4 and TCRα, 2B4 and TCRβ.

[0491] Whether prior to or after genetic or other modification of the engineered cells (such as engineered T cells (e.g. the isolated cell is a T cell), the engineered cells can be activated and expanded generally using methods as described, for example, in U.S. Pat. Nos. 6,352,694; 6,534,055; 6,905,680; 5,858,358; 6,887,466; 6,905,681; 7,144,575; 7,232,566; 7,175,843; 5,883,223; 6,905,874; 6,797,514; 6,867,041; and 7,572,631. The engineered cells can be expanded in vitro or in vivo.

[0492] In some embodiments, the method comprises editing the engineered cells ex vivo by a suitable gene modification method described elsewhere herein (e.g. gene editing via a CRISPR-Cas system) to eliminate potential alloreactive TCRs or other receptors to allow allogeneic adoptive transfer. In some embodiments, T cells are edited ex vivo by a CRISPR-Cas system or other suitable genome modification technique to knock-out or knock-down an endogenous gene encoding a TCR (e.g., an αβ TCR) or other relevant receptor to avoid graft-versus-host-disease (GVHD). In some embodiments, where the engineered cells are T cells, the engineered cells are edited ex vivo by CRISPR or other appropriate gene modification method to mutate the TRAC locus. In some embodiments, T cells are edited ex vivo via a CRISPR-Cas system using one or more guide sequences targeting the first exon of TRAC. See Liu et al., Cell Research 27:154-157 (2017). In some embodiments, the first exon of TRAC is modified using another appropriate gene modification method. In some embodiments, the method comprises use of CRISPR or other appropriate method to knock-in an exogenous gene encoding a CAR or a TCR into the TRAC locus, while simultaneously knocking-out the endogenous TCR (e.g., with a donor sequence encoding a self-cleaving P2A peptide following the CAR cDNA). See Eyquem et al., Nature 543:113-117 (2017). In some embodiments, the exogenous gene comprises a promoter-less CAR-encoding or TCR-encoding sequence which is inserted operably downstream of an endogenous TCR promoter.

[0493] In some embodiments, the method comprises editing the engineered cell, e.g. engineered T cells, ex vivo via a CRISPR-Cas system to knock-out or knock-down an endogenous gene encoding an HLA-I protein to minimize immunogenicity of the edited cells, e.g. engineered T cells. In some embodiments, engineered T cells can be edited ex vivo via a CRISPR-Cas system to mutate the beta-2 microglobulin (B2M) locus. In some embodiments, engineered cell, e.g. engineered T cells, are edited ex vivo via a CRISPR-Cas system using one or more guide sequences targeting the first exon of B2M. The first exon of B2M can also be modified using another appropriate modification method. See Liu et al., Cell Research 27:154-157 (2017). The first exon of B2M can also be modified using another appropriate modification method, which will be appreciated by those of ordinary skill in the art. In some embodiments, the method comprises use a CRISPR-Cas system to knock-in an exogenous gene encoding a CAR or a TCR into the B2M locus, while simultaneously knocking-out the endogenous B2M (e.g., with a donor sequence encoding a self-cleaving P2A peptide following the CAR cDNA). See Eyquem et al., Nature 543:113-117 (2017). This can also be accomplished using another appropriate modification method, which will be appreciated by those of ordinary skill in the art. In some embodiments, the exogenous gene comprises a promoter-less CAR-encoding or TCR-encoding sequence which is inserted operably downstream of an endogenous B2M promoter.

[0494] In some embodiments, the method comprises editing the engineered cell, e.g. engineered T cells, ex vivo via a CRISPR-Cas system to knock-out or knock-down an endogenous gene encoding an antigen targeted by an exogenous CAR or TCR. This can also be accomplished using another appropriate modification method, which will be appreciated by those of ordinary skill in the art. In some embodiments, the engineered cells, such as engineered T cells, are edited ex vivo via a CRISPR-Cas system to knock-out or knock-down the expression of a tumor antigen selected from human telomerase reverse transcriptase (hTERT), survivin, mouse double minute 2 homolog (MDM2), cytochrome P450 1B 1 (CYP1B), HER2/neu, Wilms' tumor gene 1 (WT1), livin, alphafetoprotein (AFP), carcinoembryonic antigen (CEA), mucin 16 (MUC16), MUC1, prostate-specific membrane antigen (PSMA), p53 or cyclin (DI) (see WO2016/011210). This can also be accomplished using another appropriate modification method, which will be appreciated by those of ordinary skill in the art. In some embodiments, the engineered cells, such as engineered T cells are edited ex vivo via a CRISPR-Cas system to knock-out or knock-down the expression of an antigen selected from B cell maturation antigen (BCMA), transmembrane activator and CAML Interactor (TACI), or B-cell activating factor receptor (BAFF-R), CD38, CD138, CS-1, CD33, CD26, CD30, CD53, CD92, CD100, CD148, CD150, CD200, CD261, CD262, or CD362 (see WO2017/011804). This can also be accomplished using another appropriate modification method, which will be appreciated by those of ordinary skill in the art.

### Gene Drives

[0495] The present invention also contemplates use of the engineered delivery system molecules, vectors, engineered cells, and/or engineered AAV capsid particles described herein to generate a gene drive via delivery of one or more cargo polynucleotides or production of engineered AAV capsid particles with one or more cargo polynucleotides capable of producing a gene drive. In some embodiments, the gene drive can be a Cas-mediated RNA-guided gene drive e.g. Cas- to provide RNA-guided gene drives, for example in systems analogous to gene drives described in PCT Patent Publication WO 2015/105928. Systems of this kind may for example provide methods for altering eukaryotic germline cells, by introducing into the germline cell a nucleic acid sequence encoding an RNA-guided DNA nuclease and one or more guide RNAs. The guide RNAs may be designed to be complementary to one or more target locations on genomic DNA of the germline cell. The nucleic acid sequence encoding the RNA guided DNA nuclease and the nucleic acid sequence encoding the guide RNAs may be provided on constructs between flanking sequences, with promoters arranged such that the germline cell may express the RNA guided DNA nuclease and the guide RNAs, together with any desired cargo-encoding sequences that are also situated between the flanking sequences. The flanking sequences will typically include a sequence which is identical to a corresponding sequence on a selected target chromosome, so that the flanking sequences work with the components encoded by the construct to facilitate insertion of the foreign nucleic acid construct sequences into genomic DNA at a target cut site by mechanisms such as homologous recombination, to render the germline cell homozygous for the foreign nucleic acid sequence. In this way, gene-drive systems are capable of introgressing desired cargo genes throughout a breeding population (Gantz et al., 2015, Highly efficient Cas9-mediated gene drive for population modification of the malaria vector mosquito Anopheles stephensi, PNAS 2015, published ahead of print Nov. 23, 2015, doi:10.1073/pnas.1521077112; Esvelt et al., 2014, Concerning RNA-guided gene drives for the alteration of wild populations eLife 2014; 3:e03401). In select embodiments, target sequences may be selected which have few potential off-target sites in a genome. Targeting multiple sites within a target locus, using multiple guide RNAs, may increase the cutting frequency and hinder the evolution of drive resistant alleles. Truncated guide RNAs may reduce off-target cutting. Paired nickases may be used instead of a single nuclease, to further increase specificity. Gene drive constructs (such as gene drive engineered delivery system constructs) may include cargo sequences encoding transcriptional regulators, for example to activate homologous recombination genes and/or repress non-homologous end-joining. Target sites may be chosen within an essential gene, so that non-homologous end-joining events may cause lethality rather than creating a drive-resistant allele. The gene drive constructs can be engineered to function in a range of hosts at a range of temperatures (Cho et al. 2013, Rapid and Tunable Control of Protein Stability in Caenorhabditis elegans Using a Small Molecule, PLoS ONE 8(8): e72393. doi:10.1371/journal.pone.0072393).

### Transplantation and Xenotransplantation

[0496] The engineered AAV capsid system molecules, vectors, engineered cells, and/or engineered delivery particles described herein, can be used to deliver cargo polynucleotides and/or otherwise be involved in modifying tissues for transplantation between two different persons (transplantation) or between species (xenotransplantation). Such techniques for generation of transgenic animals is described elsewhere herein. Interspecies transplantation techniques are generally known in the art. For example, RNA-guided DNA nucleases can be delivered using via engineered AAV capsid polynucleotides, vectors, engineered cells, and/or engineered AAV capsid particles described herein and can be used to knockout, knockdown or disrupt selected genes in an organ for transplant (e.g. ex vivo (e.g. after harvest but before transplantation) or in vivo (in donor or recipient)), animal, such as a transgenic pig (such as the human heme oxygenase-1 transgenic pig line), for example by disrupting expression of genes that encode epitopes recognized by the human immune system, i.e. xenoantigen genes. Candidate porcine genes for disruption may for example include a(1,3)-galactosyltransferase and cytidine monophosphate-N-acetylneuraminic acid hydroxylase genes (see PCT Patent Publication WO 2014/066505). In addition, genes encoding endogenous retroviruses may be disrupted, for example the genes encoding all porcine endogenous retroviruses (see Yang et al., 2015, Genome-wide inactivation of porcine endogenous retroviruses (PERVs), Science 27 Nov. 2015: Vol. 350 no. 6264 pp. 1101-1104). In addition, RNA-guided DNA nucleases may be used to target a site for integration of additional genes in xenotransplant donor animals, such as a human CD55 gene to improve protection against hyperacute rejection.

[0497] Where it is interspecies transplantation (such as human to human) the engineered AAV capsid system molecules, vectors, engineered cells, and/or engineered delivery particles described herein, can be used to deliver cargo polynucleotides and/or otherwise be involved to modify the tissue to be transplanted. In some embodiments, the modification can include modifying one or more HLA antigens or other tissue type determinants, such that the immunogenic profile is more similar or identical to the recipient's immunogenic profile than to the donor's so as to reduce the occurrence of rejection by the recipient. Relevant tissue type determinants are known in the art (such as those used to determine organ matching) and techniques to determine the immunogenic profile (which is made up of the expression signature of the tissue type determinants) are generally known in the art.

[0498] In some embodiments, the donor (such as before harvest) or recipient (after transplantation) can receive one or more of the engineered AAV capsid system molecules, vectors, engineered cells, and/or engineered delivery particles described herein that are capable of modifying the immunogenic profile of the transplanted cells, tissue, and/or organ. In some embodiments, the transplanted cells, tissue, and/or organ can be harvested from the donor and the engineered AAV capsid system molecules, vectors, engineered cells, and/or engineered delivery particles described herein capable of modifying the harvested cells, tissue, and/or organ to be, for example, less immunogenic or be modified to have some specific characteristic when transplanted in the recipient can be delivered to the harvested cells, tissue, and/or organ ex vivo. After delivery the cells, tissue, and/or organs can be transplanted into the donor.

Gene Modification and Treatment of Diseases with Genetic or Epigenetic Embodiments

[0499] The engineered delivery system molecules, vectors, engineered cells, and/or engineered delivery particles described herein can be used to modify genes or other polynucleotides and/or treat diseases with genetic and/or epigenetic embodiments. As described elsewhere herein the cargo molecule can be a polynucleotide that can be delivered to a cell and, in some embodiments, be integrated into the genome of the cell. In some embodiments, the cargo molecule(s) can be one or more CRISPR-Cas system components. In some embodiments, the CRISPR-Cas components, when delivered by an engineered AAV capsid particles described herein can be optionally expressed in the recipient cell and act to modify the genome of the recipient cell in a sequence specific manner. In some embodiments, the cargo molecules that can be packaged and delivered by the engineered AAV capsid particles described herein can facilitate/mediate genome modification via a method that is not dependent on CRISPR-Cas. Such non-CRISPR-Cas genome modification systems will instantly be appreciated by those of ordinary skill in the art and are also, at least in part, described elsewhere herein. In some embodiments, modification is at a specific target sequence. In other embodiments, modification is at locations that appear to be random throughout the genome.

[0500] Examples of disease-associated genes and polynucleotides and disease specific information is available from McKusick-Nathans Institute of Genetic Medicine, Johns Hopkins University (Baltimore, Md.) and National Center for Biotechnology Information, National Library of Medicine (Bethesda, Md.), available on the World Wide Web. Any of these can be appropriate to be treated by one or more of the methods described herein.

[0501] More specifically, Mutations in these genes and pathways can result in production of improper proteins or proteins in improper amounts which affect function. Further examples of genes, diseases and proteins are hereby incorporated by reference from U.S. Provisional Application No. 61/736,527 filed Dec. 12, 2012. Such genes, proteins and pathways may be the target polynucleotide of a CRISPR complex of the present invention. Examples of disease-associated genes and polynucleotides are listed in Tables A and B. Examples of signaling biochemical pathway-associated genes and polynucleotides are listed in Table C. Additional examples are discussed elsewhere herein.

TABLE A

| DISEASE/DISORDERS | GENE(S) |
|---|---|
| Neoplasia | PTEN; ATM; ATR; EGFR; ERBB2; ERBB3; ERBB4; |
| | Notch1; Notch2; Notch3; Notch4; AKT; AKT2; AKT3; HIF; |
| | HIF1a; HIF3a; Met; HRG; Bcl2; PPAR alpha; PPAR |
| | gamma; WT1 (Wilms Tumor); FGF Receptor Family |
| | members (5 members: 1, 2, 3, 4, 5); CDKN2a; APC; RB |
| | (retinoblastoma); MEN1; VHL; BRCA1; BRCA2; AR |
| | (Androgen Receptor); TSG101; IGF; IGF Receptor; Igf1 (4 |
| | variants); Igf2 (3 variants); Igf 1 Receptor; Igf 2 Receptor; |
| | Bax; Bcl2; caspases family (9 members: |
| | 1, 2, 3, 4, 6, 7, 8, 9, 12); Kras; Apc |
| Age-related Macular | Abcr; Ccl2; Cc2; cp (ceruloplasmin); Timp3; cathepsinD; |
| Degeneration | Vldlr; Ccr2 |
| Schizophrenia | Neuregulin1 (Nrg1); Erb4 (receptor for Neuregulin); |
| | Complexin1 (Cplx1); Tph1 Tryptophan hydroxylase; Tph2 |
| | Tryptophan hydroxylase 2; Neurexin 1; GSK3; GSK3a; |
| | GSK3b |
| Disorders | 5-HTT (Slc6a4); COMT; DRD (Drd1a); SLC6A3; DAOA; |
| | DTNBP1; Dao (Dao1) |
| Trinucleotide Repeat | HTT (Huntington's Dx); SBMA/SMAX1/AR (Kennedy's |
| Disorders | Dx); FXN/X25 (Friedrich's Ataxia); ATX3 (Machado- |
| | Joseph's Dx); ATXN1 and ATXN2 (spinocerebellar |
| | ataxias); DMPK (myotonic dystrophy); Atrophin-1 and Atn1 |
| | (DRPLA Dx); CBP (Creb-BP - global instability); VLDLR |
| | (Alzheimer's); Atxn7; Atxn10 |
| Fragile X Syndrome | FMR2; FXR1; FXR2; mGLUR5 |
| Secretase Related | APH-1 (alpha and beta); Presenilin (Psen1); nicastrin |
| Disorders | (Ncstn); PEN-2 |
| Others | Nos1; Parp1; Nat1; Nat2 |
| Prion - related disorders | Prp |
| ALS | SOD1; ALS2; STEX; FUS; TARDBP; VEGF (VEGF-a; |
| | VEGF-b; VEGF-c) |
| Drug addiction | Prkce (alcohol); Drd2; Drd4; ABAT (alcohol); GRIA2; |
| | Grm5; Grin1; Htr1b; Grin2a; Drd3; Pdyn; Gria1 (alcohol) |
| Autism | Mecp2; BZRAP1; MDGA2; Sema5A; Neurexin 1; Fragile X |
| | (FMR2 (AFF2); FXR1; FXR2; Mglur5) |
| Alzheimer's Disease | E1; CHIP; UCH; UBB; Tau; LRP; PICALM; Clusterin; PS1; |
| | SORL1; CR1; Vldlr; Uba1; Uba3; CHIP28 (Aqp1, |
| | Aquaporin 1); Uchl1; Uchl3; APP |
| Inflammation | IL-10; IL-1 (IL-1a; IL-1b); IL-13; IL-17 (IL-17a (CTLA8); IL- |
| | 17b; IL-17c; IL-17d; IL-17f); II-23; Cx3cr1; ptpn22; TNFa; |
| | NOD2/CARD15 for IBD; IL-6; IL-12 (IL-12a; IL-12b); |
| | CTLA4; Cx3cl1 |
| Parkinson's Disease | x-Synuclein; DJ-1; LRRK2; Parkin; PINK1 |

TABLE B

| | |
|---|---|
| Blood and | Anemia (CDAN1, CDA1, RPS19, DBA, PKLR, PK1, NT5C3, |
| coagulation diseases | UMPH1, PSN1, RHAG, RH50A, NRAMP2, SPTB, ALAS2, ANH1, |
| and disorders | ASB, ABCB7, ABC7, ASAT); Bare lymphocyte syndrome (TAPBP, |
| | TPSN, TAP2, ABCB3, PSF2, RING11, MHC2TA, C2TA, RFX5, |
| | RFXAP, RFX5), Bleeding disorders (TBXA2R, P2RX1, P2X1); Factor |
| | H and factor H-like 1 (HF1, CFH, HUS); Factor V and factor VIII |
| | (MCFD2); Factor VII deficiency (F7); Factor X deficiency (F10); |
| | Factor XI deficiency (F11); Factor XII deficiency (F12, HAF); Factor |
| | XIIIA deficiency (F13A1, F13A); Factor XIIIB deficiency (F13B); |
| | Fanconi anemia (FANCA, FACA, FA1, FA, FAA, FAAP95, FAAP90, |
| | FLJ34064, FANCB, FANCC, FACC, BRCA2, FANCD1, FANCD2, |
| | FANCD, FACD, FAD, FANCE, FACE, FANCF, XRCC9, FANCG, |
| | BRIP1, BACH1, FANCJ, PHF9, FANCL, FANCM, KIAA1596); |
| | Hemophagocytic lymphohistiocytosis disorders (PRF1, HPLH2, |
| | UNC13D, MUNC13-4, HPLH3, HLH3, FHL3); Hemophilia A (F8, |
| | F8C, HEMA); Hemophilia B (F9, HEMB), Hemorrhagic disorders (PI, |
| | ATT, F5); Leukocyte deficiencies and disorders (ITGB2, CD18, |
| | LCAMB, LAD, EIF2B1, EIF2BA, EIF2B2, EIF2B3, EIF2B5, LVWM, |
| | CACH, CLE, EIF2B4); Sickle cell anemia (HBB); Thalassemia |
| | (HBA2, HBB, HBD, LCRB, HBA1). |
| Cell dysregulation | B-cell non-Hodgkin lymphoma (BCL7A, BCL7); Leukemia (TAL1, |
| and oncology | TCL5, SCL, TAL2, FLT3, NBS1, NBS, ZNFN1A1, IK1, LYF1, |
| diseases and | HOXD4, HOX4B, BCR, CML, PHL, ALL, ARNT, KRAS2, RASK2, |
| disorders | GMPS, AF10, ARHGEF12, LARG, KIAA0382, CALM, CLTH, |
| | CEBPA, CEBP, CHIC2, BTL, FLT3, KIT, PBT, LPP, NPM1, |
| | NUP214, D9546E, CAN, CAIN, RUNX1, CBFA2, AML1, |
| | WHSC1L1, NSD3, FLT3, AF1Q, NPM1, NUMA1, ZNF145, PLZF, |
| | PML, MYL, STAT5B, AF10, CALM, CLTH, ARL11, ARLTS1, |
| | P2RX7, P2X7, BCR, CML, PHL, ALL, GRAF, NF1, VRNF, WSS, |
| | NFNS, PTPN11, PTP2C, SHP2, NS1, BCL2, CCND1, PRAD1, BCL1, |
| | TCRA, GATA1, GF1, ERYF1, NFE1, ABL1, NQO1, DIA4, NMOR1, |
| | NUP214, D9546E, CAN, CAIN). |
| Inflammation and | AIDS (KIR3DL1, NKAT3, NKB1, AMB11, KIR3DS1, IFNG, |
| immune related | CXCL12, SDF1); Autoimmune lymphoproliferative syndrome |
| diseases and | (TNFRSF6, APT1, FAS, CD95, ALPS1A); Combined |
| disorders | immunodeficiency, (IL2RG, SCIDX1, SCIDX, IMD4); HIV-1 (CCL5, |
| | SCYA5, D17S136E, TCP228), HIV susceptibility or infection (IL10, |
| | CSIF, CMKBR2, CCR2, CMKBR5, CCCKR5 (CCR5)); |
| | Immunodeficiencies (CD3E, CD3G, AICDA, AID, HIGM2, |
| | TNFRSF5, CD40, UNG, DGU, HIGM4, TNFSF5, CD40LG, HIGM1, |
| | IGM, FOXP3, IPEX, AIID, XPID, PIDX, TNFRSF14B, TACI); |
| | Inflammation (IL-10, IL-1 (IL-1a, IL-1b), IL-13, IL-17 (IL-17a |
| | (CTLA8), IL-17b, IL-17c, IL-17d, IL-17f), II-23, Cx3cr1, ptpn22, |
| | TNFa, NOD2/CARD15 for IBD, IL-6, IL-12 (IL-12a, IL-12b), |
| | CTLA4, Cx3cl1); Severe combined immunodeficiencies |
| | (SCIDs)(JAK3, JAKL, DCLRE1C, ARTEMIS, SCIDA, RAG1, |
| | RAG2, ADA, PTPRC, CD45, LCA, IL7R, CD3D, T3D, IL2RG, |
| | SCIDX1, SCIDX, IMD4). |
| Metabolic, liver, | Amyloid neuropathy (TTR, PALB); Amyloidosis (APOA1, APP, |
| kidney and protein | AAA, CVAP, AD1, GSN, FGA, LYZ, TTR, PALB); Cirrhosis |
| diseases and | (KRT18, KRT8, CIRH1A, NAIC, TEX292, KIAA1988); Cystic |
| disorders | fibrosis (CFTR, ABCC7, CF, MRP7); Glycogen storage diseases |
| | (SLC2A2, GLUT2, G6PC, G6PT, G6PT1, GAA, LAMP2, LAMPB, |
| | AGL, GDE, GBE1, GYS2, PYGL, PFKM); Hepatic adenoma, 142330 |
| | (TCF1, HNF1A, MODY3), Hepatic failure, early onset, and neurologic |
| | disorder (SCOD1, SCO1), Hepatic lipase deficiency (LIPC), |
| | Hepatoblastoma, cancer and carcinomas (CTNNB1, PDGFRL, |
| | PDGRL, PRLTS, AXIN1, AXIN, CTNNB1, TP53, P53, LFS1, IGF2R, |
| | MPRI, MET, CASP8, MCH5; Medullary cystic kidney disease |
| | (UMOD, HNFJ, FJHN, MCKD2, ADMCKD2); Phenylketonuria |
| | (PAH, PKU1, QDPR, DHPR, PTS); Polycystic kidney and hepatic |
| | disease (FCYT, PKHD1, ARPKD, PKD1, PKD2, PKD4, PKDTS, |
| | PRKCSH, G19P1, PCLD, SEC63). |
| Muscular/Skeletal | Becker muscular dystrophy (DMD, BMD, MYF6), Duchenne |
| diseases and | Muscular Dystrophy (DMD, BMD); Emery-Dreifuss muscular |
| disorders | dystrophy (LMNA, LMN1, EMD2, FPLD, CMD1A, HGPS, |
| | LGMD1B, LMNA, LMN1, EMD2, FPLD, CMD1A); |
| | Facioscapulohumeral muscular dystrophy (FSHMD1A, FSHD1A); |
| | Muscular dystrophy (FKRP, MDC1C, LGMD2I, LAMA2, LAMM, |
| | LARGE, KIAA0609, MDC1D, FCMD, TTID, MYOT, CAPN3, |
| | CANP3, DYSF, LGMD2B, SGCG, LGMD2C, DMDA1, SCG3, |
| | SGCA, ADL, DAG2, LGMD2D, DMDA2, SGCB, LGMD2E, SGCD, |
| | SGD, LGMD2F, CMD1L, TCAP, LGMD2G, CMD1N, TRIM32, |
| | HT2A, LGMD2H, FKRP, MDC1C, LGMD2I, TTN, CMD1G, TMD, |
| | LGMD2J, POMT1, CAV3, LGMD1C, SEPN1, SELN, RSMD1, |
| | PLEC1, PLTN, EBS1); Osteopetrosis (LRP5, BMND1, LRP7, LR3, |
| | OPPG, VBCH2, CLCN7, CLC7, OPTA2, OSTM1, GL, TCIRG1, |
| | TIRC7, OC116, OPTB1); Muscular atrophy (VAPB, VAPC, ALS8, |
| | SMN1, SMA1, SMA2, SMA3, SMA4, BSCL2, SPG17, GARS, |
| | SMAD1, CMT2D, HEXB, IGHMBP2, SMUBP2, CATF1, SMARD1). |
| Neurological and | ALS (SOD1, ALS2, STEX, FUS, TARDBP, VEGF (VEGF-a, VEGF- |
| neuronal diseases | b, VEGF-c); Alzheimer disease (APP, AAA, CVAP, AD1, APOE, |
| and disorders | AD2, PSEN2, AD4, STM2, APBB2, FE65L1, NO53, PLAU, URK, |
| | ACE, DCP1, ACE1, MPO, PACIP1, PAXIP1L, PTIP, A2M, BLMH, |
| | BMH, PSEN1, AD3); Autism (Mecp2, BZRAP1, MDGA2, Sema5A, |
| | Neurexin 1, GLO1, MECP2, RTT, PPMX, MRX16, MRX79, NLGN3, |
| | NLGN4, KIAA1260, AUTSX2); Fragile X Syndrome (FMR2, FXR1, |
| | FXR2, mGLUR5); Huntington's disease and disease like disorders |
| | (HD, IT15, PRNP, PRIP, JPH3, JP3, HDL2, TBP, SCA17); Parkinson |
| | disease (NR4A2, NURR1, NOT, TINUR, SNCAIP, TBP, SCA17, |
| | SNCA, NACP, PARK1, PARK4, DJ1, PARK7, LRRK2, PARK8, |
| | PINK1, PARK6, UCHL1, PARKS, SNCA, NACP, PARK1, PARK4, |
| | PRKN, PARK2, PDJ, DBH, NDUFV2); Rett syndrome (MECP2, |
| | RTT, PPMX, MRX16, MRX79, CDKL5, STK9, MECP2, RTT, |
| | PPMX, MRX16, MRX79, x-Synuclein, DJ-1); Schizophrenia |
| | (Neuregulin1 (Nrg1), Erb4 (receptor for Neuregulin), Complexin1 |
| | (Cplx1), Tph1 Tryptophan hydroxylase, Tph2, Tryptophan hydroxylase |
| | 2, Neurexin 1, GSK3, GSK3a, GSK3b, 5-HTT (Slc6a4), COMT, DRD |
| | (Drd1a), SLC6A3, DADA, DTNBP1, Dao (Dao1)); Secretase Related |
| | Disorders (APH-1 (alpha and beta), Presenilin (Psen1), nicastrin, |
| | (Ncstn), PEN-2, Nos1, Parp1, Nat1, Nat2); Trinucleotide Repeat |
| | Disorders (HTT (Huntington's Dx), SBMA/SMAX1/AR (Kennedy's |
| | Dx), FXN/X25 (Friedrich's Ataxia), ATX3 (Machado- Joseph's Dx), |
| | ATXN1 and ATXN2 (spinocerebellar ataxias), DMPK (myotonic |
| | dystrophy), Atrophin-1 and Atn1 (DRPLA Dx), CBP (Creb-BP - global |
| | instability), VLDLR (Alzheimer's), Atxn7, Atxn10). |
| Ocular diseases and | Age-related macular degeneration (Abcr, Ccl2, Cc2, cp |
| disorders | (ceruloplasmin), Timp3, cathepsinD, Vldlr, Ccr2); Cataract (CRYAA, |
| | CRYA1, CRYBB2, CRYB2, PITX3, BFSP2, CP49, CP47, CRYAA, |
| | CRYA1, PAX6, AN2, MGDA, CRYBA1, CRYB1, CRYGC, CRYG3, |
| | CCL, LIM2, MP19, CRYGD, CRYG4, BFSP2, CP49, CP47, HSF4, |
| | CTM, HSF4, CTM, MIP, AQP0, CRYAB, CRYA2, CTPP2, |
| | CRYBB1, CRYGD, CRYG4, CRYBB2, CRYB2, CRYGC, CRYG3, |
| | CCL, CRYAA, CRYA1, GJA8, CX50, CAE1, GJA3, CX46, CZP3, |
| | CAE3, CCM1, CAM, KRIT1); Corneal clouding and dystrophy |
| | (APOA1, TGFBI, CSD2, CDGG1, CSD, BIGH3, CDG2, TACSTD2, |
| | TROP2, M1S1, VSX1, RINX, PPCD, PPD, KTCN, COL8A2, FECD, |
| | PPCD2, PIP5K3, CFD); Cornea plana congenital (KERA, CNA2); |
| | Glaucoma (MYOC, TIGR, GLC1A, JOAG, GPOA, OPTN, GLC1E, |
| | FIP2, HYPL, NRP, CYP1B1, GLC3A, OPA1, NTG, NPG, CYP1B1, |
| | GLC3A); Leber congenital amaurosis (CRB1, RP12, CRX, CORD2, |
| | CRD, RPGRIP1, LCA6, CORD9, RPE65, RP20, AIPL1, LCA4, |
| | GUCY2D, GUC2D, LCA1, CORD6, RDH12, LCA3); Macular |
| | dystrophy (ELOVL4, ADMD, STGD2, STGD3, RDS, RP7, PRPH2, |
| | PRPH, AVMD, AOFMD, VMD2). |

TABLE C

| CELLULAR | |
|---|---|
| FUNCTION | GENES |
| PI3K/AKT Signaling | PRKCE; ITGAM; ITGA5; IRAK1; PRKAA2; EIF2AK2; |
| | PTEN; EIF4E; PRKCZ; GRK6; MAPK1; TSC1; PLK1; |
| | AKT2; IKBKB; PIK3CA; CDK8; CDKN1B; NFKB2; BCL2; |
| | PIK3CB; PPP2R1A; MAPK8; BCL2L1; MAPK3; TSC2; |
| | ITGA1; KRAS; EIF4EBP1; RELA; PRKCD; NO53; |
| | PRKAA1; MAPK9; CDK2; PPP2CA; PIM1; ITGB7; |
| | YWHAZ; ILK; TP53; RAF1; IKBKG; RELB; DYRK1A; |
| | CDKN1A; ITGB1; MAP2K2; JAK1; AKT1; JAK2; PIK3R1; |
| | CHUK; PDPK1; PPP2R5C; CTNNB1; MAP2K1; NFKB1; |
| | PAK3; ITGB3; CCND1; GSK3A; FRAP1; SFN; ITGA2; |
| | TTK; CSNK1A1; BRAF; GSK3B; AKT3; FOXO1; SGK; |
| | HSP90AA1; RPS6KB1 |
| ERK/MAPK Signaling | PRKCE; ITGAM; ITGA5; HSPB1; IRAK1; PRKAA2; |
| | EIF2AK2; RAC1; RAP1A; TLN1; EIF4E; ELK1; GRK6; |
| | MAPK1; RAC2; PLK1; AKT2; PIK3CA; CDK8; CREB1; |
| | PRKCI; PTK2; FOS; RPS6KA4; PIK3CB; PPP2R1A; |
| | PIK3C3; MAPK8; MAPK3; ITGA1; ETS1; KRAS; MYCN; |
| | EIF4EBP1; PPARG; PRKCD; PRKAA1; MAPK9; SRC; |
| | CDK2; PPP2CA; PIM1; PIK3C2A; ITGB7; YWHAZ; |
| | PPP1CC; KSR1; PXN; RAF1; FYN; DYRK1A; ITGB1; |
| | MAP2K2; PAK4; PIK3R1; STAT3; PPP2R5C; MAP2K1; |
| | PAK3; ITGB3; ESR1; ITGA2; MYC; TTK; CSNK1A1; |
| | CRKL; BRAF; ATF4; PRKCA; SRF; STAT1; SGK |
| Glucocorticoid Receptor | RAC1; TAF4B; EP300; SMAD2; TRAF6; PCAF; ELK1; |
| Signaling | MAPK1; SMAD3; AKT2; IKBKB; NCOR2; UBE2I; |
| | PIK3CA; CREB1; FOS; HSPA5; NFKB2; BCL2; |
| | MAP3K14; STAT5B; PIK3CB; PIK3C3; MAPK8; BCL2L1; |
| | MAPK3; T5C22D3; MAPK10; NRIP1; KRAS; MAPK13; |
| | RELA; STAT5A; MAPK9; NOS2A; PBX1; NR3C1; |
| | PIK3C2A; CDKN1C; TRAF2; SERPINE1; NCOA3; |
| | MAPK14; TNF; RAF1; IKBKG; MAP3K7; CREBBP; |
| | CDKN1A; MAP2K2; JAK1; IL8; NCOA2; AKT1; JAK2; |
| | PIK3R1; CHUK; STAT3; MAP2K1; NFKB1; TGFBR1; |
| | ESR1; SMAD4; CEBPB; JUN; AR; AKT3; CCL2; MMP1; |
| | STAT1; IL6; H5P90AA1 |
| Axonal Guidance | PRKCE; ITGAM; ROCK1; ITGA5; CXCR4; ADAM12; |
| Signaling | IGF1; RAC1; RAP1A; EIF4E; PRKCZ; NRP1; NTRK2; |
| | ARHGEF7; SMO; ROCK2; MAPK1; PGF; RAC2; |
| | PTPN11; GNAS; AKT2; PIK3CA; ERBB2; PRKCI; PTK2; |
| | CFL1; GNAQ; PIK3CB; CXCL12; PIK3C3; WNT11; |
| | PRKD1; GNB2L1; ABL1; MAPK3; ITGA1; KRAS; RHOA; |
| | PRKCD; PIK3C2A; ITGB7; GLI2; PXN; VASP; RAF1; |
| | FYN; ITGB1; MAP2K2; PAK4; ADAM17; AKT1; PIK3R1; |
| | GLI1; WNT5A; ADAM10; MAP2K1; PAK3; ITGB3; |
| | CDC42; VEGFA; ITGA2; EPHA8; CRKL; RND1; GSK3B; |
| | AKT3; PRKCA |
| Ephrin Receptor | PRKCE; ITGAM; ROCK1; ITGA5; CXCR4; IRAK1; |
| Signaling | PRKAA2; EIF2AK2; RAC1; RAP1A; GRK6; ROCK2; |
| | MAPK1; PGF; RAC2; PTPN11; GNAS; PLK1; AKT2; |
| | DOK1; CDK8; CREB1; PTK2; CFL1; GNAQ; MAP3K14; |
| | CXCL12; MAPK8; GNB2L1; ABL1; MAPK3; ITGA1; |
| | KRAS; RHOA; PRKCD; PRKAA1; MAPK9; SRC; CDK2; |
| | PIM1; ITGB7; PXN; RAF1; FYN; DYRK1A; ITGB1; |
| | MAP2K2; PAK4; AKT1; JAK2; STAT3; ADAM10; |
| | MAP2K1; PAK3; ITGB3; CDC42; VEGFA; ITGA2; |
| | EPHA8; TTK; CSNK1A1; CRKL; BRAF; PTPN13; ATF4; |
| | AKT3; SGK |
| Actin Cytoskeleton | ACTN4; PRKCE; ITGAM; ROCK1; ITGA5; IRAK1; |
| Signaling | PRKAA2; EIF2AK2; RAC1; INS; ARHGEF7; GRK6; |
| | ROCK2; MAPK1; RAC2; PLK1; AKT2; PIK3CA; CDK8; |
| | PTK2; CFL1; PIK3CB; MYH9; DIAPH1; PIK3C3; MAPK8; |
| | F2R; MAPK3; SLC9A1; ITGA1; KRAS; RHOA; PRKCD; |
| | PRKAA1; MAPK9; CDK2; PIM1; PIK3C2A; ITGB7; |
| | PPP1CC; PXN; VIL2; RAF1; GSN; DYRK1A; ITGB1; |
| | MAP2K2; PAK4; PIP5K1A; PIK3R1; MAP2K1; PAK3; |
| | ITGB3; CDC42; APC; ITGA2; TTK; CSNK1A1; CRKL; |
| | BRAF; VAV3; SGK |
| Huntington's Disease | PRKCE; IGF1; EP300; RCOR1; PRKCZ; HDAC4; TGM2; |
| Signaling | MAPK1; CAPNS1; AKT2; EGFR; NCOR2; SP1; CAPN2; |
| | PIK3CA; HDAC5; CREB1; PRKCI; HSPA5; REST; |
| | GNAQ; PIK3CB; PIK3C3; MAPK8; IGF1R; PRKD1; |
| | GNB2L1; BCL2L1; CAPN1; MAPK3; CASP8; HDAC2; |
| | HDAC7A; PRKCD; HDAC11; MAPK9; HDAC9; PIK3C2A; |
| | HDAC3; TP53; CASP9; CREBBP; AKT1; PIK3R1; |
| | PDPK1; CASP1; APAF1; FRAP1; CASP2; JUN; BAX; |
| | ATF4; AKT3; PRKCA; CLTC; SGK; HDAC6; CASP3 |
| Apoptosis Signaling | PRKCE; ROCK1; BID; IRAK1; PRKAA2; EIF2AK2; BAK1; |
| | BIRC4; GRK6; MAPK1; CAPNS1; PLK1; AKT2; IKBKB; |
| | CAPN2; CDK8; FAS; NFKB2; BCL2; MAP3K14; MAPK8; |
| | BCL2L1; CAPN1; MAPK3; CASP8; KRAS; RELA; |
| | PRKCD; PRKAA1; MAPK9; CDK2; PIM1; TP53; TNF; |
| | RAF1; IKBKG; RELB; CASP9; DYRK1A; MAP2K2; |
| | CHUK; APAF1; MAP2K1; NFKB1; PAK3; LMNA; CASP2; |
| | BIRC2; TTK; CSNK1A1; BRAF; BAX; PRKCA; SGK; |
| | CASP3; BIRC3; PARP1 |
| B Cell Receptor | RAC1; PTEN; LYN; ELK1; MAPK1; RAC2; PTPN11; |
| Signaling | AKT2; IKBKB; PIK3CA; CREB1; SYK; NFKB2; CAMK2A; |
| | MAP3K14; PIK3CB; PIK3C3; MAPK8; BCL2L1; ABL1; |
| | MAPK3; ETS1; KRAS; MAPK13; RELA; PTPN6; MAPK9; |
| | EGR1; PIK3C2A; BTK; MAPK14; RAF1; IKBKG; RELB; |
| | MAP3K7; MAP2K2; AKT1; PIK3R1; CHUK; MAP2K1; |
| | NFKB1; CDC42; GSK3A; FRAP1; BCL6; BCL10; JUN; |
| | GSK3B; ATF4; AKT3; VAV3; RP56KB1 |
| Leukocyte Extravasation | ACTN4; CD44; PRKCE; ITGAM; ROCK1; CXCR4; CYBA; |
| Signaling | RAC1; RAP1A; PRKCZ; ROCK2; RAC2; PTPN11; |
| | MMP14; PIK3CA; PRKCI; PTK2; PIK3CB; CXCL12; |
| | PIK3C3; MAPK8; PRKD1; ABL1; MAPK10; CYBB; |
| | MAPK13; RHOA; PRKCD; MAPK9; SRC; PIK3C2A; BTK; |
| | MAPK14; NOX1; PXN; VIL2; VASP; ITGB1; MAP2K2; |
| | CTNND1; PIK3R1; CTNNB1; CLDN1; CDC42; F11R; ITK; |
| | CRKL; VAV3; CTTN; PRKCA; MMP1; MMP9 |
| Integrin Signaling | ACTN4; ITGAM; ROCK1; ITGA5; RAC1; PTEN; RAP1A; |
| | TLN1; ARHGEF7; MAPK1; RAC2; CAPNS1; AKT2; |
| | CAPN2; PIK3CA; PTK2; PIK3CB; PIK3C3; MAPK8; |
| | CAV1; CAPN1; ABL1; MAPK3; ITGA1; KRAS; RHOA; |
| | SRC; PIK3C2A; ITGB7; PPP1CC; ILK; PXN; VASP; |
| | RAF1; FYN; ITGB1; MAP2K2; PAK4; AKT1; PIK3R1; |
| | TNK2; MAP2K1; PAK3; ITGB3; CDC42; RND3; ITGA2; |
| | CRKL; BRAF; GSK3B; AKT3 |
| Acute Phase Response | IRAK1; SOD2; MYD88; TRAF6; ELK1; MAPK1; PTPN11; |
| Signaling | AKT2; IKBKB; PIK3CA; FOS; NFKB2; MAP3K14; |
| | PIK3CB; MAPK8; RIPK1; MAPK3; IL6ST; KRAS; |
| | MAPK13; IL6R; RELA; SOCS1; MAPK9; FTL; NR3C1; |
| | TRAF2; SERPINE1; MAPK14; TNF; RAF1; PDK1; |
| | IKBKG; RELB; MAP3K7; MAP2K2; AKT1; JAK2; PIK3R1; |
| | CHUK; STAT3; MAP2K1; NFKB1; FRAP1; CEBPB; JUN; |
| | AKT3; IL1R1; IL6 |
| PTEN Signaling | ITGAM; ITGA5; RAC1; PTEN; PRKCZ; BCL2L11; |
| | MAPK1; RAC2; AKT2; EGFR; IKBKB; CBL; PIK3CA; |
| | CDKN1B; PTK2; NFKB2; BCL2; PIK3CB; BCL2L1; |
| | MAPK3; ITGA1; KRAS; ITGB7; ILK; PDGFRB; INSR; |
| | RAF1; IKBKG; CASP9; CDKN1A; ITGB1; MAP2K2; |
| | AKT1; PIK3R1; CHUK; PDGFRA; PDPK1; MAP2K1; |
| | NFKB1; ITGB3; CDC42; CCND1; GSK3A; ITGA2; |
| | GSK3B; AKT3; FOXO1; CASP3; RP56KB1 |
| p53 Signaling | PTEN; EP300; BBC3; PCAF; FASN; BRCA1; GADD45A; |
| | BIRC5; AKT2; PIK3CA; CHEK1; TP53INP1; BCL2; |
| | PIK3CB; PIK3C3; MAPK8; THBS1; ATR; BCL2L1; E2F1; |
| | PMAIP1; CHEK2; TNFRSF10B; TP73; RB1; HDAC9; |
| | CDK2; PIK3C2A; MAPK14; TP53; LRDD; CDKN1A; |
| | HIPK2; AKT1; PIK3R1; RRM2B; APAF1; CTNNB1; |
| | SIRT1; CCND1; PRKDC; ATM; SFN; CDKN2A; JUN; |
| | SNAI2; GSK3B; BAX; AKT3 |
| Aryl Hydrocarbon | HSPB1; EP300; FASN; TGM2; RXRA; MAPK1; NQO1; |
| Receptor | NCOR2; SP1; ARNT; CDKN1B; FOS; CHEK1; |
| Signaling | SMARCA4; NFKB2; MAPK8; ALDH1A1; ATR; E2F1; |
| | MAPK3; NRIP1; CHEK2; RELA; TP73; GSTP1; RB1; |
| | SRC; CDK2; AHR; NFE2L2; NCOA3; TP53; TNF; |
| | CDKN1A; NCOA2; APAF1; NFKB1; CCND1; ATM; ESR1; |
| | CDKN2A; MYC; JUN; ESR2; BAX; IL6; CYP1B1; |
| | HSP90AA1 |
| Xenobiotic Metabolism | PRKCE; EP300; PRKCZ; RXRA; MAPK1; NQO1; |
| Signaling | NCOR2; PIK3CA; ARNT; PRKCI; NFKB2; CAMK2A; |
| | PIK3CB; PPP2R1A; PIK3C3; MAPK8; PRKD1; |
| | ALDH1A1; MAPK3; NRIP1; KRAS; MAPK13; PRKCD; |
| | GSTP1; MAPK9; NOS2A; ABCB1; AHR; PPP2CA; FTL; |
| | NFE2L2; PIK3C2A; PPARGC1A; MAPK14; TNF; RAF1; |
| | CREBBP; MAP2K2; PIK3R1; PPP2R5C; MAP2K1; |
| | NFKB1; KEAP1; PRKCA; EIF2AK3; IL6; CYP1B1; |
| | HSP90AA1 |
| SAPK/JNK Signaling | PRKCE; IRAK1; PRKAA2; EIF2AK2; RAC1; ELK1; |
| | GRK6; MAPK1; GADD45A; RAC2; PLK1; AKT2; PIK3CA; |
| | FADD; CDK8; PIK3CB; PIK3C3; MAPK8; RIPK1; |
| | GNB2L1; IRS1; MAPK3; MAPK10; DAXX; KRAS; |
| | PRKCD; PRKAA1; MAPK9; CDK2; PIM1; PIK3C2A; |
| | TRAF2; TP53; LCK; MAP3K7; DYRK1A; MAP2K2; |
| | PIK3R1; MAP2K1; PAK3; CDC42; JUN; TTK; CSNK1A1; |
| | CRKL; BRAF; SGK |
| PPAr/RXR Signaling | PRKAA2; EP300; INS; SMAD2; TRAF6; PPARA; FASN; |
| | RXRA; MAPK1; SMAD3; GNAS; IKBKB; NCOR2; |
| | ABCA1; GNAQ; NFKB2; MAP3K14; STAT5B; MAPK8; |
| | IRS1; MAPK3; KRAS; RELA; PRKAA1; PPARGC1A; |
| | NCOA3; MAPK14; INSR; RAF1; IKBKG; RELB; MAP3K7; |
| | CREBBP; MAP2K2; JAK2; CHUK; MAP2K1; NFKB1; |
| | TGFBR1; SMAD4; JUN; IL1R1; PRKCA; IL6; H5P90AA1; |
| | ADIPOQ |
| NF-KB Signaling | IRAK1; EIF2AK2; EP300; INS; MYD88; PRKCZ; TRAF6; |
| | TBK1; AKT2; EGFR; IKBKB; PIK3CA; BTRC; NFKB2; |
| | MAP3K14; PIK3CB; PIK3C3; MAPK8; RIPK1; HDAC2; |
| | KRAS; RELA; PIK3C2A; TRAF2; TLR4; PDGFRB; TNF; |
| | INSR; LCK; IKBKG; RELB; MAP3K7; CREBBP; AKT1; |
| | PIK3R1; CHUK; PDGFRA; NFKB1; TLR2; BCL10; |
| | GSK3B; AKT3; TNFAIP3; IL1R1 |
| Neuregulin Signaling | ERBB4; PRKCE; ITGAM; ITGA5; PTEN; PRKCZ; ELK1; |
| | MAPK1; PTPN11; AKT2; EGFR; ERBB2; PRKCI; |
| | CDKN1B; STAT5B; PRKD1; MAPK3; ITGA1; KRAS; |
| | PRKCD; STAT5A; SRC; ITGB7; RAF1; ITGB1; MAP2K2; |
| | ADAM17; AKT1; PIK3R1; PDPK1; MAP2K1; ITGB3; |
| | EREG; FRAP1; PSEN1; ITGA2; MYC; NRG1; CRKL; |
| | AKT3; PRKCA; H5P90AA1; RP56KB1 |
| Wnt & Beta catenin | CD44; EP300; LRP6; DVL3; CSNK1E; GJA1; SMO; |
| Signaling | AKT2; PIN1; CDH1; BTRC; GNAQ; MARK2; PPP2R1A; |
| | WNT11; SRC; DKK1; PPP2CA; SOX6; SFRP2; ILK; |
| | LEF1; SOX9; TP53; MAP3K7; CREBBP; TCF7L2; AKT1; |
| | PPP2R5C; WNT5A; LRP5; CTNNB1; TGFBR1; CCND1; |
| | GSK3A; DVL1; APC; CDKN2A; MYC; CSNK1A1; GSK3B; |
| | AKT3; SOX2 |
| Insulin Receptor | PTEN; INS; EIF4E; PTPN1; PRKCZ; MAPK1; TSC1; |
| Signaling | PTPN11; AKT2; CBL; PIK3CA; PRKCI; PIK3CB; PIK3C3; |
| | MAPK8; IRS1; MAPK3; TSC2; KRAS; EIF4EBP1; |
| | SLC2A4; PIK3C2A; PPP1CC; INSR; RAF1; FYN; |
| | MAP2K2; JAK1; AKT1; JAK2; PIK3R1; PDPK1; MAP2K1; |
| | GSK3A; FRAP1; CRKL; GSK3B; AKT3; FOXO1; SGK; |
| | RPS6KB1 |
| IL-6 Signaling | HSPB1; TRAF6; MAPKAPK2; ELK1; MAPK1; PTPN11; |
| | IKBKB; FOS; NFKB2; MAP3K14; MAPK8; MAPK3; |
| | MAPK10; IL6ST; KRAS; MAPK13; IL6R; RELA; SOCS1; |
| | MAPK9; ABCB1; TRAF2; MAPK14; TNF; RAF1; IKBKG; |
| | RELB; MAP3K7; MAP2K2; IL8; JAK2; CHUK; STAT3; |
| | MAP2K1; NFKB1; CEBPB; JUN; IL1R1; SRF; IL6 |
| Hepatic Cholestasis | PRKCE; IRAK1; INS; MYD88; PRKCZ; TRAF6; PPARA; |
| | RXRA; IKBKB; PRKCI; NFKB2; MAP3K14; MAPK8; |
| | PRKD1; MAPK10; RELA; PRKCD; MAPK9; ABCB1; |
| | TRAF2; TLR4; TNF; INSR; IKBKG; RELB; MAP3K7; IL8; |
| | CHUK; NR1H2; TJP2; NFKB1; ESR1; SREBF1; FGFR4; |
| | JUN; IL1R1; PRKCA; IL6 |
| IGF-1 Signaling | IGF1; PRKCZ; ELK1; MAPK1; PTPN11; NEDD4; AKT2; |
| | PIK3CA; PRKCI; PTK2; FOS; PIK3CB; PIK3C3; MAPK8; |
| | IGF1R; IRS1; MAPK3; IGFBP7; KRAS; PIK3C2A; |
| | YWHAZ; PXN; RAF1; CASP9; MAP2K2; AKT1; PIK3R1; |
| | PDPK1; MAP2K1; IGFBP2; SFN; JUN; CYR61; AKT3; |
| | FOXO1; SRF; CTGF; RP56KB1 |
| NRF2-mediated | PRKCE; EP300; SOD2; PRKCZ; MAPK1; SQSTM1; |
| Oxidative | NQO1; PIK3CA; PRKCI; FOS; PIK3CB; PIK3C3; MAPK8; |
| Stress Response | PRKD1; MAPK3; KRAS; PRKCD; GSTP1; MAPK9; FTL; |
| | NFE2L2; PIK3C2A; MAPK14; RAF1; MAP3K7; CREBBP; |
| | MAP2K2; AKT1; PIK3R1; MAP2K1; PPIB; JUN; KEAP1; |
| | GSK3B; ATF4; PRKCA; EIF2AK3; H5P90AA1 |
| Hepatic Fibrosis/Hepatic | EDN1; IGF1; KDR; FLT1; SMAD2; FGFR1; MET; PGF; |
| Stellate Cell Activation | SMAD3; EGFR; FAS; CSF1; NFKB2; BCL2; MYH9; |
| | IGF1R; IL6R; RELA; TLR4; PDGFRB; TNF; RELB; IL8; |
| | PDGFRA; NFKB1; TGFBR1; SMAD4; VEGFA; BAX; |
| | IL1R1; CCL2; HGF; MMP1; STAT1; IL6; CTGF; MMP9 |
| PPAR Signaling | EP300; INS; TRAF6; PPARA; RXRA; MAPK1; IKBKB; |
| | NCOR2; FOS; NFKB2; MAP3K14; STAT5B; MAPK3; |
| | NRIP1; KRAS; PPARG; RELA; STAT5A; TRAF2; |
| | PPARGC1A; PDGFRB; TNF; INSR; RAF1; IKBKG; |
| | RELB; MAP3K7; CREBBP; MAP2K2; CHUK; PDGFRA; |
| | MAP2K1; NFKB1; JUN; IL1R1; HSP90AA1 |
| Fc Epsilon RI Signaling | PRKCE; RAC1; PRKCZ; LYN; MAPK1; RAC2; PTPN11; |
| | AKT2; PIK3CA; SYK; PRKCI; PIK3CB; PIK3C3; MAPK8; |
| | PRKD1; MAPK3; MAPK10; KRAS; MAPK13; PRKCD; |
| | MAPK9; PIK3C2A; BTK; MAPK14; TNF; RAF1; FYN; |
| | MAP2K2; AKT1; PIK3R1; PDPK1; MAP2K1; AKT3; |
| | VAV3; PRKCA |
| G-Protein Coupled | PRKCE; RAP1A; RGS16; MAPK1; GNAS; AKT2; IKBKB; |
| Receptor Signaling | PIK3CA; CREB1; GNAQ; NFKB2; CAMK2A; PIK3CB; |
| | PIK3C3; MAPK3; KRAS; RELA; SRC; PIK3C2A; RAF1; |
| | IKBKG; RELB; FYN; MAP2K2; AKT1; PIK3R1; CHUK; |
| | PDPK1; STAT3; MAP2K1; NFKB1; BRAF; ATF4; AKT3; |
| | PRKCA |
| Inositol Phosphate | PRKCE; IRAK1; PRKAA2; EIF2AK2; PTEN; GRK6; |
| Metabolism | MAPK1; PLK1; AKT2; PIK3CA; CDK8; PIK3CB; PIK3C3; |
| | MAPK8; MAPK3; PRKCD; PRKAA1; MAPK9; CDK2; |
| | PIM1; PIK3C2A; DYRK1A; MAP2K2; PIP5K1A; PIK3R1; |
| | MAP2K1; PAK3; ATM; TTK; CSNK1A1; BRAF; SGK |
| PDGF Signaling | EIF2AK2; ELK1; ABL2; MAPK1; PIK3CA; FOS; PIK3CB; |
| | PIK3C3; MAPK8; CAV1; ABL1; MAPK3; KRAS; SRC; |
| | PIK3C2A; PDGFRB; RAF1; MAP2K2; JAK1; JAK2; |
| | PIK3R1; PDGFRA; STAT3; SPHK1; MAP2K1; MYC; |
| | JUN; CRKL; PRKCA; SRF; STAT1; SPHK2 |
| VEGF Signaling | ACTN4; ROCK1; KDR; FLT1; ROCK2; MAPK1; PGF; |
| | AKT2; PIK3CA; ARNT; PTK2; BCL2; PIK3CB; PIK3C3; |
| | BCL2L1; MAPK3; KRAS; HIF1A; NOS3; PIK3C2A; PXN; |
| | RAF1; MAP2K2; ELAVL1; AKT1; PIK3R1; MAP2K1; SFN; |
| | VEGFA; AKT3; FOXO1; PRKCA |
| Natural Killer Cell | PRKCE; RAC1; PRKCZ; MAPK1; RAC2; PTPN11; |
| Signaling | KIR2DL3; AKT2; PIK3CA; SYK; PRKCI; PIK3CB; |
| | PIK3C3; PRKD1; MAPK3; KRAS; PRKCD; PTPN6; |
| | PIK3C2A; LCK; RAF1; FYN; MAP2K2; PAK4; AKT1; |
| | PIK3R1; MAP2K1; PAK3; AKT3; VAV3; PRKCA |
| Cell Cycle: G1/S | HDAC4; SMAD3; SUV39H1; HDAC5; CDKN1B; BTRC; |
| Checkpoint Regulation | ATR; ABL1; E2F1; HDAC2; HDAC7A; RB1; HDAC11; |
| | HDAC9; CDK2; E2F2; HDAC3; TP53; CDKN1A; CCND1; |
| | E2F4; ATM; RBL2; SMAD4; CDKN2A; MYC; NRG1; |
| | GSK3B; RBL1; HDAC6 |
| T Cell Receptor | RAC1; ELK1; MAPK1; IKBKB; CBL; PIK3CA; FOS; |
| Signaling | NFKB2; PIK3CB; PIK3C3; MAPK8; MAPK3; KRAS; |
| | RELA; PIK3C2A; BTK; LCK; RAF1; IKBKG; RELB; FYN; |
| | MAP2K2; PIK3R1; CHUK; MAP2K1; NFKB1; ITK; BCL10; |
| | JUN; VAV3 |
| Death Receptor Signaling | CRADD; HSPB1; BID; BIRC4; TBK1; IKBKB; FADD; |
| | FAS; NFKB2; BCL2; MAP3K14; MAPK8; RIPK1; CASP8; |
| | DAXX; TNFRSF10B; RELA; TRAF2; TNF; IKBKG; RELB; |
| | CASP9; CHUK; APAF1; NFKB1; CASP2; BIRC2; CASP3; |
| | BIRC3 |
| FGF Signaling | RAC1; FGFR1; MET; MAPKAPK2; MAPK1; PTPN11; |
| | AKT2; PIK3CA; CREB1; PIK3CB; PIK3C3; MAPK8; |
| | MAPK3; MAPK13; PTPN6; PIK3C2A; MAPK14; RAF1; |
| | AKT1; PIK3R1; STAT3; MAP2K1; FGFR4; CRKL; ATF4; |
| | AKT3; PRKCA; HGF |
| GM-CSF Signaling | LYN; ELK1; MAPK1; PTPN11; AKT2; PIK3CA; CAMK2A; |
| | STAT5B; PIK3CB; PIK3C3; GNB2L1; BCL2L1; MAPK3; |
| | ETS1; KRAS; RUNX1; PIM1; PIK3C2A; RAF1; MAP2K2; |
| | AKT1; JAK2; PIK3R1; STAT3; MAP2K1; CCND1; AKT3; |
| | STAT1 |
| Amyotrophic Lateral | BID; IGF1; RAC1; BIRC4; PGF; CAPNS1; CAPN2; |
| Sclerosis Signaling | PIK3CA; BCL2; PIK3CB; PIK3C3; BCL2L1; CAPN1; |
| | PIK3C2A; TP53; CASP9; PIK3R1; RAB5A; CASP1; |
| | APAF1; VEGFA; BIRC2; BAX; AKT3; CASP3; BIRC3 |
| JAK/Stat Signaling | PTPN1; MAPK1; PTPN11; AKT2; PIK3CA; STAT5B; |
| | PIK3CB; PIK3C3; MAPK3; KRAS; SOCS1; STAT5A; |
| | PTPN6; PIK3C2A; RAF1; CDKN1A; MAP2K2; JAK1; |
| | AKT1; JAK2; PIK3R1; STAT3; MAP2K1; FRAP1; AKT3; |
| | STAT1 |
| Nicotinate and | PRKCE; IRAK1; PRKAA2; EIF2AK2; GRK6; MAPK1; |
| Nicotinamide | PLK1; AKT2; CDK8; MAPK8; MAPK3; PRKCD; PRKAA1; |
| Metabolism | PBEF1; MAPK9; CDK2; PIM1; DYRK1A; MAP2K2; |
| | MAP2K1; PAK3; NT5E; TTK; CSNK1A1; BRAF; SGK |
| Chemokine Signaling | CXCR4; ROCK2; MAPK1; PTK2; FOS; CFL1; GNAQ; |
| | CAMK2A; CXCL12; MAPK8; MAPK3; KRAS; MAPK13; |
| | RHOA; CCR3; SRC; PPP1CC; MAPK14; NOX1; RAF1; |
| | MAP2K2; MAP2K1; JUN; CCL2; PRKCA |
| IL-2 Signaling | ELK1; MAPK1; PTPN11; AKT2; PIK3CA; SYK; FOS; |
| | STAT5B; PIK3CB; PIK3C3; MAPK8; MAPK3; KRAS; |
| | SOCS1; STAT5A; PIK3C2A; LCK; RAF1; MAP2K2; |
| | JAK1; AKT1; PIK3R1; MAP2K1; JUN; AKT3 |
| Synaptic Long Term | PRKCE; IGF1; PRKCZ; PRDX6; LYN; MAPK1; GNAS; |
| Depression | PRKCI; GNAQ; PPP2R1A; IGF1R; PRKD1; MAPK3; |
| | KRAS; GRN; PRKCD; NO53; NOS2A; PPP2CA; |
| | YWHAZ; RAF1; MAP2K2; PPP2R5C; MAP2K1; PRKCA |
| Estrogen Receptor | TAF4B; EP300; CARM1; PCAF; MAPK1; NCOR2; |
| Signaling | SMARCA4; MAPK3; NRIP1; KRAS; SRC; NR3C1; |
| | HDAC3; PPARGC1A; RBM9; NCOA3; RAF1; CREBBP; |
| | MAP2K2; NCOA2; MAP2K1; PRKDC; ESR1; ESR2 |
| Protein Ubiquitination | TRAF6; SMURF1; BIRC4; BRCA1; UCHL1; NEDD4; |
| Pathway | CBL; UBE2I; BTRC; HSPA5; USP7; USP10; FBXW7; |
| | USP9X; STUB1; U5P22; B2M; BIRC2; PARK2; USP8; |
| | USP1; VHL; H5P90AA1; BIRC3 |
| IL-10 Signaling | TRAF6; CCR1; ELK1; IKBKB; SP1; FOS; NFKB2; |
| | MAP3K14; MAPK8; MAPK13; RELA; MAPK14; TNF; |
| | IKBKG; RELB; MAP3K7; JAK1; CHUK; STAT3; NFKB1; |
| | JUN; IL1R1; IL6 |
| VDR/RXR Activation | PRKCE; EP300; PRKCZ; RXRA; GADD45A; HES1; |
| | NCOR2; SP1; PRKCI; CDKN1B; PRKD1; PRKCD; |
| | RUNX2; KLF4; YY1; NCOA3; CDKN1A; NCOA2; SPP1; |
| | LRP5; CEBPB; FOXO1; PRKCA |
| TGF-beta Signaling | EP300; SMAD2; SMURF1; MAPK1; SMAD3; SMAD1; |
| | FOS; MAPK8; MAPK3; KRAS; MAPK9; RUNX2; |
| | SERPINE1; RAF1; MAP3K7; CREBBP; MAP2K2; |
| | MAP2K1; TGFBR1; SMAD4; JUN; SMAD5 |
| Toll-like Receptor | IRAK1; EIF2AK2; MYD88; TRAF6; PPARA; ELK1; |
| Signaling | IKBKB; FOS; NFKB2; MAP3K14; MAPK8; MAPK13; |
| | RELA; TLR4; MAPK14; IKBKG; RELB; MAP3K7; CHUK; |
| | NFKB1; TLR2; JUN |
| p38 MAPK Signaling | HSPB1; IRAK1; TRAF6; MAPKAPK2; ELK1; FADD; FAS; |
| | CREB1; DDIT3; RPS6KA4; DAXX; MAPK13; TRAF2; |
| | MAPK14; TNF; MAP3K7; TGFBR1; MYC; ATF4; IL1R1; |
| | SRF; STAT1 |
| Neurotrophin/TRK | NTRK2; MAPK1; PTPN11; PIK3CA; CREB1; FOS; |
| Signaling | PIK3CB; PIK3C3; MAPK8; MAPK3; KRAS; PIK3C2A; |
| | RAF1; MAP2K2; AKT1; PIK3R1; PDPK1; MAP2K1; |
| | CDC42; JUN; ATF4 |
| FXR/RXR Activation | INS; PPARA; FASN; RXRA; AKT2; SDC1; MAPK8; |
| | APOB; MAPK10; PPARG; MTTP; MAPK9; PPARGC1A; |
| | TNF; CREBBP; AKT1; SREBF1; FGFR4; AKT3; FOXO1 |
| Synaptic Long Term | PRKCE; RAP1A; EP300; PRKCZ; MAPK1; CREB1; |
| Potentiation | PRKCI; GNAQ; CAMK2A; PRKD1; MAPK3; KRAS; |
| | PRKCD; PPP1CC; RAF1; CREBBP; MAP2K2; MAP2K1; |
| | ATF4; PRKCA |
| Calcium Signaling | RAP1A; EP300; HDAC4; MAPK1; HDAC5; CREB1; |
| | CAMK2A; MYH9; MAPK3; HDAC2; HDAC7A; HDAC11; |
| | HDAC9; HDAC3; CREBBP; CALR; CAMKK2; ATF4; |
| | HDAC6 |
| EGF Signaling | ELK1; MAPK1; EGFR; PIK3CA; FOS; PIK3CB; PIK3C3; |
| | MAPK8; MAPK3; PIK3C2A; RAF1; JAK1; PIK3R1; |
| | STAT3; MAP2K1; JUN; PRKCA; SRF; STAT1 |
| Hypoxia Signaling in the | EDN1; PTEN; EP300; NQO1; UBE2I; CREB1; ARNT; |
| Cardiovascular System | HIF1A; SLC2A4; NO53; TP53; LDHA; AKT1; ATM; |
| | VEGFA; JUN; ATF4; VHL; H5P90AA1 |
| LPS/IL-1 Mediated | IRAK1; MYD88; TRAF6; PPARA; RXRA; ABCA1; |
| Inhibition | MAPK8; ALDH1A1; GSTP1; MAPK9; ABCB1; TRAF2; |
| of RXR Function | TLR4; TNF; MAP3K7; NR1H2; SREBF1; JUN; IL1R1 |
| LXR/RXR Activation | FASN; RXRA; NCOR2; ABCA1; NFKB2; IRF3; RELA; |
| | NOS2A; TLR4; TNF; RELB; LDLR; NR1H2; NFKB1; |
| | SREBF1; IL1R1; CCL2; IL6; MMP9 |
| Amyloid Processing | PRKCE; CSNK1E; MAPK1; CAPNS1; AKT2; CAPN2; |
| | CAPN1; MAPK3; MAPK13; MAPT; MAPK14; AKT1; |
| | PSEN1; CSNK1A1; GSK3B; AKT3; APP |
| IL-4 Signaling | AKT2; PIK3CA; PIK3CB; PIK3C3; IRS1; KRAS; SOCS1; |
| | PTPN6; NR3C1; PIK3C2A; JAK1; AKT1; JAK2; PIK3R1; |
| | FRAP1; AKT3; RPS6KB1 |
| Cell Cycle: G2/M DNA | EP300; PCAF; BRCA1; GADD45A; PLK1; BTRC; |
| Damage Checkpoint | CHEK1; ATR; CHEK2; YWHAZ; TP53; CDKN1A; |
| Regulation | PRKDC; ATM; SFN; CDKN2A |
| Nitric Oxide Signaling in | KDR; FLT1; PGF; AKT2; PIK3CA; PIK3CB; PIK3C3; |
| the | CAV1; PRKCD; NO53; PIK3C2A; AKT1; PIK3R1; |
| Cardiovascular System | VEGFA; AKT3; HSP90AA1 |
| Purine Metabolism | NME2; SMARCA4; MYH9; RRM2; ADAR; EIF2AK4; |
| | PKM2; ENTPD1; RAD51; RRM2B; TJP2; RAD51C; |
| | NT5E; POLD1; NME1 |
| cAMP-mediated | RAP1A; MAPK1; GNAS; CREB1; CAMK2A; MAPK3; |
| Signaling | SRC; RAF1; MAP2K2; STAT3; MAP2K1; BRAF; ATF4 |
| Mitochondrial | SOD2; MAPK8; CASP8; MAPK10; MAPK9; CASP9; |
| Dysfunction | PARK7; PSEN1; PARK2; APP; CASP3 |
| Notch Signaling | HES1; JAG1; NUMB; NOTCH4; ADAM17; NOTCH2; |
| | PSEN1; NOTCH3; NOTCH1; DLL4 |
| Endoplasmic Reticulum | HSPA5; MAPK8; XBP1; TRAF2; ATF6; CASP9; ATF4; |
| Stress Pathway | EIF2AK3; CASP3 |
| Pyrimidine Metabolism | NME2; AICDA; RRM2; EIF2AK4; ENTPD1; RRM2B; |
| | NT5E; POLD1; NME1 |
| Parkinson's Signaling | UCHL1; MAPK8; MAPK13; MAPK14; CASP9; PARK7; |
| | PARK2; CASP3 |
| Cardiac & Beta | GNAS; GNAQ; PPP2R1A; GNB2L1; PPP2CA; PPP1CC; |
| Adrenergic Signaling | PPP2R5C |
| Glycolysis/Gluconeogenesis | HK2; GCK; GPI; ALDH1A1; PKM2; LDHA; HK1 |
| Interferon Signaling | IRF1; SOCS1; JAK1; JAK2; IFITM1; STAT1; IFIT3 |
| Sonic Hedgehog | ARRB2; SMO; GLI2; DYRK1A; GLI1; GSK3B; DYRK1B |
| Signaling | |
| Glycerophospholipid | PLD1; GRN; GPAM; YWHAZ; SPHK1; SPHK2 |
| Metabolism | |
| Phospholipid | PRDX6; PLD1; GRN; YWHAZ; SPHK1; SPHK2 |
| Degradation | |
| Tryptophan Metabolism | SIAH2; PRMT5; NEDD4; ALDH1A1; CYP1B1; SIAH1 |
| Lysine Degradation | SUV39H1; EHMT2; NSD1; SETD7; PPP2R5C |
| Nucleotide Excision | ERCC5; ERCC4; XPA; XPC; ERCC1 |
| Repair | |
| Pathway | |
| Starch and Sucrose | UCHL1; HK2; GCK; GPI; HK1 |
| Metabolism | |
| Aminosugars Metabolism | NQO1; HK2; GCK; HK1 |
| Arachidonic Acid | PRDX6; GRN; YWHAZ; CYP1B1 |
| Metabolism | |
| Circadian Rhythm | CSNK1E; CREB1; ATF4; NR1D1 |
| Signaling | |
| Coagulation System | BDKRB1; F2R; SERPINE1; F3 |
| Dopamine Receptor | PPP2R1A; PPP2CA; PPP1CC; PPP2R5C |
| Signaling | |
| Glutathione Metabolism | IDH2; GSTP1; ANPEP; IDH1 |
| Glycerolipid Metabolism | ALDH1A1; GPAM; SPHK1; SPHK2 |
| Linoleic Acid | PRDX6; GRN; YWHAZ; CYP1B1 |
| Metabolism | |
| Methionine Metabolism | DNMT1; DNMT3B; AHCY; DNMT3A |
| Pyruvate Metabolism | GLO1; ALDH1A1; PKM2; LDHA |
| Arginine and Proline | ALDH1A1; NOS3; NOS2A |
| Metabolism | |
| Eicosanoid Signaling | PRDX6; GRN; YWHAZ |
| Fructose and Mannose | HK2; GCK; HK1 |
| Metabolism | |
| Galactose Metabolism | HK2; GCK; HK1 |
| Stilbene, Coumarine and | PRDX6; PRDX1; TYR |
| Lignin Biosynthesis | |
| Antigen Presentation | CALR; B2M |
| Pathway | |
| Biosynthesis of Steroids | NQO1; DHCR7 |
| Butanoate Metabolism | ALDH1A1; NLGN1 |
| Citrate Cycle | IDH2; IDH1 |
| Fatty Acid Metabolism | ALDH1A1; CYP1B1 |
| Glycerophospholipid | PRDX6; CHKA |
| Metabolism | |
| Histidine Metabolism | PRMT5; ALDH1A1 |
| Inositol Metabolism | ERO1L; APEX1 |
| Metabolism of | GSTP1; CYP1B1 |
| Xenobiotics | |
| by Cytochrome p450 | |
| Methane Metabolism | PRDX6; PRDX1 |
| Phenylalanine | PRDX6; PRDX1 |
| Metabolism | |
| Propanoate Metabolism | ALDH1A1; LDHA |
| Selenoamino Acid | PRMT5; AHCY |
| Metabolism | |
| Sphingolipid Metabolism | SPHK1; SPHK2 |
| Aminophosphonate | PRMT5 |
| Metabolism | |
| Androgen and Estrogen | PRMT5 |
| Metabolism | |
| Ascorbate and Aldarate | ALDH1A1 |
| Metabolism | |
| Bile Acid Biosynthesis | ALDH1A1 |
| Cysteine Metabolism | LDHA |
| Fatty Acid Biosynthesis | FASN |
| Glutamate Receptor | GNB2L1 |
| Signaling | |
| NRF2-mediated | PRDX1 |
| Oxidative | |
| Stress Response | |
| Pentose Phosphate | GPI |
| Pathway | |
| Pentose and Glucuronate | UCHL1 |
| Interconversions | |
| Retinol Metabolism | ALDH1A1 |
| Riboflavin Metabolism | TYR |
| Tyrosine Metabolism | PRMT5, TYR |
| Ubiquinone | Biosynthesis PRMT5 |
| Valine, Leucine and | ALDH1A1 |
| Isoleucine Degradation | |
| Glycine, Serine and | CHKA |
| Threonine Metabolism | |
| Lysine Degradation | ALDH1A1 |
| Pain/Taste | TRPM5; TRPA1 |
| Pain | TRPM7; TRPC5; TRPC6; TRPC1; Cnr1; cnr2; Grk2; |
| | Trpa1; Pomc; Cgrp; Crf; Pka; Era; Nr2b; TRPM5; Prkaca; |
| | Prkacb; Prkar1a; Prkar2a |
| Mitochondrial Function | AIF; CytC; SMAC (Diablo); Aifm-1; Aifm-2 |
| Developmental | BMP-4; Chordin (Chrd); Noggin (Nog); WNT (Wnt2; |
| Neurology | Wnt2b; Wnt3a; Wnt4; Wnt5a; Wnt6; Wnt7b; Wnt8b; |
| | Wnt9a; Wnt9b; Wnt10a; Wnt10b; Wnt16); beta-catenin; |
| | Dkk-1; Frizzled related proteins; Otx-2; Gbx2; FGF-8; |
| | Reelin; Dab1; unc-86 (Pou4f1 or Brn3a); Numb; Reln |

[0502] Thus, also described herein are methods of inducing one or more mutations in a eukaryotic or prokaryotic cell (in vitro, i.e. in an isolated eukaryotic cell) as herein discussed comprising delivering to cell a vector as described herein. The mutation(s) can include the introduction, deletion, or substitution of one or more nucleotides at a target sequence of cell(s). In some embodiments, the mutations can include the introduction, deletion, or substitution of 1-75 nucleotides at each target sequence of said cell(s). The mutations can include the introduction, deletion, or substitution of 1, 5, 10, 11, 12, 13, 14, 15, 16, 17, 18, 19, 20, 21, 22, 23, 24, 25, 26, 27, 28, 29, 30, 35, 40, 45, 50, or 75 nucleotides at each target sequence. The mutations can include the introduction, deletion, or substitution of 5, 10, 11, 12, 13, 14, 15, 16, 17, 18, 19, 20, 21, 22, 23, 24, 25, 26, 27, 28, 29, 30, 35, 40, 45, 50, or 75 nucleotides at each target sequence of said cell(s). The mutations include the introduction, deletion, or substitution of 10, 11, 12, 13, 14, 15, 16, 17, 18, 19, 20, 21, 22, 23, 24, 25, 26, 27, 28, 29, 30, 35, 40, 45, 50, or 75 nucleotides at each target sequence of said cell(s). The mutations can include the introduction, deletion, or substitution of 20, 21, 22, 23, 24, 25, 26, 27, 28, 29, 30, 35, 40, 45, 50, or 75 nucleotides at each target sequence of said cell(s). The mutations can include the introduction, deletion, or substitution of 40, 45, 50, 75, 100, 200, 300, 400 or 500 nucleotides at each target sequence of said cell(s). The mutations can include the introduction, deletion, or substitution of 500, 600, 700, 800, 900, 1000, 1100, 1200, 1300, 1400, 1500, 1600, 1700, 1800, 1900, 2000, 2100, 2200, 2300, 2400, 2500, 2600, 2700, 2800, 2900, 3000, 3100, 3200, 3300, 3400, 3500, 3600, 3700, 3800, 3900, 4000, 4100, 4200, 4300, 4400, 4500, 4600, 4700, 4800, 4900, 5000, 5100, 5200, 5300, 5400, 5500, 5600, 5700, 5800, 5900, 6000, 6100, 6200, 6300, 6400, 6500, 6600, 6700, 6800, 6900, 7000, 7100, 7200, 7300, 7400, 7500, 7600, 7700, 7800, 7900, 8000, 8100, 8200, 8300, 8400, 8500, 8600, 8700, 8800, 8900, 9000, 9100, 9200, 9300, 9400, 9500, 9600, 9700, 9800, or 9900 to 10000 nucleotides at each target sequence of said cell(s).

[0503] In some embodiments, the modifications can include the introduction, deletion, or substitution of nucleotides at each target sequence of said cell(s) via nucleic acid components (e.g. guide(s) RNA(s) or sgRNA(s)), such as those mediated by a CRISPR-Cas system.

[0504] In some embodiments, the modifications can include the introduction, deletion, or substitution of nucleotides at a target or random sequence of said cell(s) via a non CRISPR-Cas system or technique. Such techniques are discussed elsewhere herein, such as where engineered cells and methods of generating the engineered cells and organisms are discussed.

[0505] For minimization of toxicity and off-target effect when using a CRISPR-Cas system, it may be important to control the concentration of Cas mRNA and guide RNA delivered. Optimal concentrations of Cas mRNA and guide RNA can be determined by testing different concentrations in a cellular or non-human eukaryote animal model and using deep sequencing the analyze the extent of modification at potential off-target genomic loci. Alternatively, to minimize the level of toxicity and off-target effect, Cas nickase mRNA (for example S. pyogenes Cas9-like with the D10A mutation) can be delivered with a pair of guide RNAs targeting a site of interest. Guide sequences and strategies to minimize toxicity and off-target effects can be as in WO 2014/093622 (PCT/US2013/074667); or, via mutation as herein.

[0506] Typically, in the context of an endogenous CRISPR system, formation of a CRISPR complex (comprising a guide sequence hybridized to a target sequence and complexed with one or more Cas proteins) results in cleavage of one or both strands in or near (e.g. within 1, 2, 3, 4, 5, 6, 7, 8, 9, 10, 20, 50, or more base pairs from) the target sequence. Without wishing to be bound by theory, a tracr sequence, which may comprise or consist of all or a portion of a wild-type tracr sequence (e.g. about or more than about 20, 26, 32, 45, 48, 54, 63, 67, 85, or more nucleotides of a wild-type tracr sequence), may also form part of a CRISPR complex, such as by hybridization along at least a portion of the tracr sequence to all or a portion of a tracr mate sequence that is operably linked to a guide sequence.

[0507] In one embodiment, the invention provides a method of modifying a target polynucleotide in a eukaryotic cell. In some embodiments, the method includes delivering an engineered cell described herein and/or an engineered AAV capsid particle described herein having a CRISPR-Cas molecule as a cargo molecule to a subject and/or cell. The CRISPR-Cas system molecule(s) delivered can complex to bind to the target polynucleotide, e.g., to effect cleavage of said target polynucleotide, thereby modifying the target polynucleotide, wherein the CRISPR complex comprises a CRISPR enzyme complexed with a guide sequence hybridized to a target sequence within said target polynucleotide, wherein said guide sequence can be linked to a tracr mate sequence which in turn hybridizes to a tracr sequence. In some embodiments, said cleavage comprises cleaving one or two strands at the location of the target sequence by said CRISPR enzyme. In some embodiments, said cleavage results in decreased transcription of a target gene. In some embodiments, the method further comprises repairing said cleaved target polynucleotide by homologous recombination with an exogenous template polynucleotide, wherein said repair results in a mutation comprising an insertion, deletion, or substitution of one or more nucleotides of said target polynucleotide. In some embodiments, said mutation results in one or more amino acid changes in a protein expressed from a gene comprising the target sequence. In some embodiments, the method further comprises delivering one or more vectors to said eukaryotic cell, wherein one or more vectors comprise the CRISPR enzyme and one or more vectors drive expression of one or more of: the guide sequence linked to the tracr mate sequence, and the tracr sequence. In some embodiments, said CRISPR enzyme drive expression of one or more of: the guide sequence linked to the tracr mate sequence, and the tracr sequence. In some embodiments such CRISPR enzyme are delivered to the eukaryotic cell in a subject. In some embodiments, said modifying takes place in said eukaryotic cell in a cell culture. In some embodiments, the method further comprises isolating said eukaryotic cell from a subject prior to said modifying. In some embodiments, the method further comprises returning said eukaryotic cell and/or cells derived therefrom to said subject. In some embodiments, the isolated cells can be returned to the subject after delivery of one or more engineered AAV capsid particles to the isolated cell. In some embodiments, the isolated cells can be returned to the subject after delivering one or more molecules of the engineered delivery system described herein to the isolated cell, thus making the isolated cells engineered cells as previously described.

### Screening and Cell Selection

[0508] The engineered AAV capsid system vectors, engineered cells, and/or engineered AAV capsid particles described herein can be used in a screening assay and/or cell selection assay. The engineered delivery system vectors, engineered cells, and/or engineered AAV capsid particles can be delivered to a subject and/or cell. In some embodiments, the cell is a eukaryotic cell. The cell can be in vitro, ex vivo, in situ, or in vivo. The engineered AAV capsid system molecules, vectors, engineered cells, and/or engineered AAV capsid particles described herein can introduce an exogenous molecule or compound to subject or cell to which they are delivered. The presence of an exogenous molecule or compound can be detected which can allow for identification of a cell and/or attribute thereof. In some embodiments, the delivered molecules or particles can impart a gene or other nucleotide modification (e.g. mutations, gene or polynucleotide insertion and/or deletion, etc.). In some embodiments the nucleotide modification can be detected in a cell by sequencing. In some embodiments, the nucleotide modification can result in a physiological and/or biological modification to the cell that results in a detectable phenotypic change in the cell, which can allow for detection, identification, and/or selection of the cell. In some embodiments, the phenotypic change can be cell death, such as embodiments where binding of a CRISPR complex to a target polynucleotide results in cell death. Embodiments of the invention allow for selection of specific cells without requiring a selection marker or a two-step process that may include a counter-selection system. The cell(s) may be prokaryotic or eukaryotic cells.

[0509] In one embodiment, the invention provides for a method of selecting one or more cell(s) by introducing one or more mutations in a gene in the one or more cell (s), the method comprising: introducing one or more vectors, which can include one or more engineered delivery system molecules or vectors described elsewhere herein, into the cell (s), wherein the one or more vectors can include a CRISPR enzyme and/or drive expression of one or more of: a guide sequence linked to a tracr mate sequence, a tracr sequence, and an editing template; or other polynucleotide to be inserted into the cell and/or genome thereof; wherein, for example that which is being expressed is within and expressed in vivo by the CRISPR enzyme and/or the editing template, when included, comprises the one or more mutations that abolish CRISPR enzyme cleavage; allowing homologous recombination of the editing template with the target polynucleotide in the cell(s) to be selected; allowing a CRISPR complex to bind to a target polynucleotide to effect cleavage of the target polynucleotide within said gene, wherein the CRISPR complex comprises the CRISPR enzyme complexed with (1) the guide sequence that is hybridized to the target sequence within the target polynucleotide, and (2) the tracr mate sequence that is hybridized to the tracr sequence, wherein binding of the CRISPR complex to the target polynucleotide induces cell death, thereby allowing one or more cell(s) in which one or more mutations have been introduced to be selected. In a preferred embodiment, the CRISPR enzyme is a Cas protein. In another embodiment of the invention the cell to be selected may be a eukaryotic cell.

[0510] The screening methods involving the engineered AAV capsid system molecules, vectors, engineered cells, and/or engineered AAV capsid particles, including but not limited to those that deliver one more CRISPR-Cas system molecules to cell, can be used in detection methods such as fluorescence in situ hybridization (FISH). In some embodiments, one or more components of an engineered CRISPR-Cas system that includes a catalytically inactive Cas protein, can be delivered by an engineered AAV capsid system molecule, engineered cell, and/or engineered AAV capsid particle described elsewhere herein to a cell and used in a FISH method. The CRISPR-Cas system can include an inactivated Cas protein (dCas) (e.g. a dCas9), which lacks the ability to produce DNA double-strand breaks may be fused with a marker, such as fluorescent protein, such as the enhanced green fluorescent protein (eEGFP) and co-expressed with small guide RNAs to target pericentric, centric and teleomeric repeats in vivo. The dCas system can be used to visualize both repetitive sequences and individual genes in the human genome. Such new applications of labelled dCas, dCas CRISPR-Cas systems, engineered AAV capsid system molecules, engineered cells, and/or engineered AAV capsid particles can be used in imaging cells and studying the functional nuclear architecture, especially in cases with a small nucleus volume or complex 3-D structures. (Chen B, Gilbert L A, Cimini B A, Schnitzbauer J, Zhang W, Li G W, Park J, Blackburn E H, Weissman J S, Qi L S, Huang B. 2013. Dynamic imaging of genomic loci in living human cells by an optimized CRISPR/Cas system. Cell 155(7):1479-91. doi: 10.1016/j.cell.2013.12.001., the teachings of which can be applied and/or adapted to the CRISPR systems described herein. A similar approach involving a polynucleotide fused to a marker (e.g. a fluorescent marker) can be delivered to a cell via an engineered AAV capsid system molecule, vector, engineered cell, and/or engineered AAV capsid particle described herein and integrated into the genome of the cell and/or otherwise interact with a region of the genome of a cell for FISH analysis.

[0511] Similar approaches for studying other cell organelles and other cell structures can be accomplished by delivering to the cell (e.g. via an engineered delivery AAV capsid molecule, engineered cell, and/or engineered AAV capsid particle described herein) one or more molecules fused to a marker (such as a fluorescent marker), wherein the molecules fused to the marker are capable of targeting one or more cell structures. By analyzing the presence of the markers, one can identify and/or image specific cell structures.

[0512] In some embodiments, the engineered AAV capsid system molecules and/or engineered AAV capsid particles can be used in a screening assay inside or outside of a cell. In some embodiments, the screening assay can include delivering a CRISPR-Cas cargo molecule(s) via an engineered AAV capsid particle.

[0513] Use of the present system in screening is also provided by the present invention, e.g., gain of function screens. Cells which are artificially forced to overexpress a gene are be able to down regulate the gene over time (re-establishing equilibrium) e.g. by negative feedback loops. By the time the screen starts the unregulated gene might be reduced again. Other screening assays are discussed elsewhere herein.

[0514] In an embodiment, the invention provides a cell from or of an in vitro method of delivery, wherein the method comprises contacting the delivery system with a cell, optionally a eukaryotic cell, whereby there is delivery into the cell of constituents of the delivery system, and optionally obtaining data or results from the contacting, and transmitting the data or results.

[0515] In an embodiment, the invention provides a cell from or of an in vitro method of delivery, wherein the method comprises contacting the delivery system with a cell, optionally a eukaryotic cell, whereby there is delivery into the cell of constituents of the delivery system, and optionally obtaining data or results from the contacting, and transmitting the data or results; and wherein the cell product is altered compared to the cell not contacted with the delivery system, for example altered from that which would have been wild type of the cell but for the contacting. In an embodiment, the cell product is non-human or animal. In some embodiments, the cell product is human.

[0516] In some embodiments, a host cell is transiently or non-transiently transfected with one or more vectors described herein. In some embodiments, a cell is transfected as it naturally occurs in a subject optionally to be reintroduced therein. In some embodiments, a cell that is transfected is taken from a subject. In some embodiments, the cell obtained from or is derived from cells taken from a subject, such as a cell line. Delivery mechanisms and techniques of the engineered AAV capsid system, engineered AAV capsid particles are described elsewhere herein.

[0517] In some embodiments, it is envisaged to introduce the engineered AAV capsid system molecule(s) and/or engineered AAV capsid particle(s) directly to the host cell. For instance, the engineered AAV capsid system molecule(s) can be delivered together with one or more cargo molecules to be packaged into an engineered AAV capsid particle.

[0518] In some embodiments, the invention provides a method of expressing an engineered delivery molecule and cargo molecule to be packaged in an engineered GTA particle in a cell that can include the step of introducing the vector according any of the vector delivery systems disclosed herein.

[0519] The invention is further described in the following examples, which do not limit the scope of the invention described in the claims.

### EXAMPLES

### Example 1—mRNA Based Detection Methods are More Stringent for Selection of AAV Variants

[0520] FIG. 1 demonstrates the adeno-associated virus (AAV) transduction mechanism, which results in production of mRNA. As is demonstrated in FIG. 1, functional transduction of a cell by an AAV particle can result in the production of an mRNA strand. Non-functional transduction would not produce such a product despite the viral genome being detectable using a DNA-based assay. Thus, mRNA-based detection assays to detect transduction by e.g. an AAV can be more stringent and provide feedback as to the functionality of a virus particle that is able to functionally transduce a cell. FIG. 2 shows a graph that can demonstrate that mRNA-based selection of AAV variants can be more stringent than DNA-based selection. The virus library was expressed under the control of a CMV promoter.

### Example 2—mRNA Based Detection Methods can be Used to Detect AAV Capsid Variants from a Capsid Variant Library

[0521] FIGS. 3A-3B show graphs that demonstrate a correlation between the virus library and vector genome DNA (FIG. 3A) and mRNA (FIG. 3B) in the liver. FIGS. 4A-4F show graphs that can demonstrate capsid variants expressed at the mRNA level identified in different tissues.

### Example 3—Capsid mRNA Expression can be Driven by Tissue Specific Promoters

[0522] FIGS. 5A-5C show graphs that demonstrate capsid mRNA expression in different tissues under the control of cell-type specific promoters (as noted on x-axis). CMV was included as an exemplary constitutive promoter. CK8 is a muscle-specific promoter. MHCK7 is a muscle-specific promoter. hSyn is a neuron specific promoter.

### Example 4—Capsid Variant Library Generation, Variant Screening, and Variant Dentification

[0523] Generally, an AAV capsid library can be generated by expressing engineered capsid vectors each containing an engineered AAV capsid polynucleotide previously described in an appropriate AAV producer cell line. See e.g. FIG. 8. This can generate an AAV capsid library that can contain one more desired cell-specific engineered AAV capsid variant. FIG. 7 shows a schematic demonstrating embodiments of generating an AAV capsid variant library, particularly insertion of a random n-mer (n=3-15 amino acids) into a wild-type AAV, e.g. AAV9. In this example, random 7-mers were inserted between aa588-589 of variable region VIII of AAV9 viral protein and used to form the viral genome containing vectors with one variant per vector. As shown in FIG. 8, the capsid variant vector library was used to generate AAV particles where each capsid variant encapsulated its coding sequence as the vector genome. FIG. 9 shows vector maps of representative AAV capsid plasmid library vectors (see e.g. FIG. 8) that can be used in an AAV vector system to generate an AAV capsid variant library. The library can be generated with the capsid variant polynucleotide under the control of a tissue specific promoter or constitutive promoter. The library was also made with capsid variant polynucleotide that included a polyadenylation signal.

[0524] As shown in FIG. 6 the AAV capsid library can be administered to various non-human animals for a first round of mRNA-based selection. As shown in FIG. 1, the transduction process by AAVs and related vectors result in the production of an mRNA molecule that is reflective of the genome of the virus that transduced the cell. As is at least demonstrated in the Examples herein, mRNA based-selection can be more specific and effective to determine a virus particle capable of functionally transducing a cell because it is based on the functional product produced as opposed to just detecting the presence of a virus particle in the cell by measuring the presence of viral DNA.

[0525] After first-round administration, one or more engineered AAV virus particles having a desired capsid variant can then be used to form a filtered AAV capsid library. Desirable AAV virus particles can be identified by measuring the mRNA expression of the capsid variants and determining which variants are highly expressed in the desired cell type(s) as compared to non-desired cells type(s). Those that are highly expressed in the desired cell, tissue, and/or organ type are the desired AAV capsid variant particles. In some embodiments, the AAV capsid variant encoding polynucleotide is under control of a tissue-specific promoter that has selective activity in the desired cell, tissue, or organ.

[0526] The engineered AAV capsid variant particles identified from the first round can then be administered to various non-human animals. In some embodiments, the animals used in the second round of selection and identification are not the same as those animals used for first round selection and identification. Similar to round 1, after administration the top expressing variants in the desired cell, tissue, and/or organ type(s) can be identified by measuring viral mRNA expression in the cells. The top variants identified after round two can then be optionally barcoded and optionally pooled. In some embodiments, top variants from the second round can then be administered to a non-human primate to identify the top cell-specific variant(s), particularly if the end use for the top variant is in humans. Administration at each round can be systemic.

[0527] FIG. 10 shows a graph that demonstrates the viral titer (calculated as AAV9 vector genome/15 cm dish) produced by libraries generated using different promoters. As demonstrated in FIG. 10, virus titer was not affected significantly be the use of different promoters.

[0528] FIGS. 11A-11C show graphs (FIGS. 11A and 11C) and schematic (FIG. 11B) that demonstrate the correlation between the amount of plasmid library vector used for virus library production and cross-packaging. FIG. 11A can demonstrate the effect of the plasmid library vector amount on virus titer. FIG. 11B can demonstrate the nucleotide sequence of the random n-mer (FIG. 11C shows by way of example a 7-mer) as inserted between the codon for aa588 and aa 589 of wild-type AAV9. Each X indicates an amino acid. N indicates any nucleotide (G, A, T, C). K indicates that the nucleotide at that position is T or G. FIG. 11C can demonstrate the effect of the plasmid library vector amount on % reads containing a STOP codon. Increasing the amount of plasmid library vector used to produce the virus particle library increased the titer as measured by the amount of library vector genome/15 cm dish of cells transduced (FIG. 11A). Additionally, the percentage of reads that included a stop codon introduced by the random n-mer motif increased when the amount of plasmid library vector used to produce the virus particle library was increased.

[0529] FIGS. 12A-12F show graphs that demonstrate the results obtained after the first round of selection in C57BL/6 mice using a capsid library expressed under the control of the MHCK7 muscle-specific promoter.

[0530] FIGS. 13A-13D show graphs that demonstrate the results obtained after the second round of selection in C57BL/6 mice.

[0531] FIGS. 14A-14B shows graphs that can demonstrate a correlation between the abundance of variants encoded by synonymous codons. This graph demonstrates that there is little to no codon bias in both the virus library and the functional virus particles.

[0532] FIG. 15 shows a graph that can demonstrate a correlation between the abundance of the same variants expressed under the control of two different muscle specific promoters (MHCK7 and CK8). This graph can demonstrate that there is little effect of which tissue-specific promoter is used to generate the capsid variant library, at least for muscle cells.

### Example 5—Muscle-Tropic rAAV Capsids

[0533] FIG. 16 shows a graph that can demonstrate muscle-tropic capsid variants that produce rAAV with similar titers to wild-type AAV9 capsid.

[0534] FIG. 17 shows images that can demonstrate a comparison of mouse tissue transduction between rAAV9-GFP and rMyoAAV-GFP.

[0535] FIG. 18 shows a panel of images that can demonstrate a comparison of mouse tissue transduction between rAAV9-GFP and rMyoAAV-G.

[0536] FIG. 19 shows a panel of images that can demonstrate a comparison of mouse tissue transduction between rAAV9-GFP and rMyoAAV-GF.

[0537] FIG. 20 shows a schematic of selection of potent capsid variants for muscle-directed gene delivery across species.

[0538] FIGS. 21A-21C show tables that demonstrate selection in different strains of mice and identify the same variants as the top muscle-tropic hits.

[0539] Various modifications and variations of the described methods, pharmaceutical compositions, and kits of the invention will be apparent to those skilled in the art without departing from the scope and spirit of the invention. Although the invention has been described in connection with specific embodiments, it will be understood that it is capable of further modifications and that the invention as claimed should not be unduly limited to such specific embodiments. Indeed, various modifications of the described modes for carrying out the invention that are obvious to those skilled in the art are intended to be within the scope of the invention. This application is intended to cover any variations, uses, or adaptations of the invention following, in general, the principles of the invention and including such departures from the present disclosure come within known customary practice within the art to which the invention pertains and may be applied to the essential features herein before set forth.

What is claimed is:

1. An engineered capsid polypeptide comprising: an n-mer motif, wherein the n-mer motif comprises RGDXₙ, wherein n is 3-15 amino acids, optionally 6 or 7 amino acids, and wherein each X amino acid is independently selected from any amino acid.

2. The engineered capsid polypeptide of claim 1, wherein
a. X₁ is selected from L, T, A, M, V, Q, or M;
b. X₂ is selected from T, M, S, N, L, A, or I;
c. X₃ is selected from T, E, N, O, S, Q, Y, A, or D;
d. X₄ is selected from P, Y, K, L, H, T, or S;
e. or any combination of (a)-(d).

3. The engineered capsid polypeptide of claim 1, wherein the n-mer motif has an amino acid sequence according to any one of SEQ ID NOs: 13-50, 1277-1289, 1291, 1301, 1304, 1313, 1351, 1354, 1363, 1375, 1409, 1427, 1435, 1488, 1592, 1593, 1637, 1657, 1673, 1749, 1761, 1791, 1915, 3737-3748, 3750, 3765-3766, 3788, 3806, 3816, 3844, 4013, 4048, 4083, 4155, 4159, 4213, 4218, 4245, 6647-6659, 6661-6663, 6683, 6702, 6753, 6766, 6782, 6842, 7016, 7058, 7414, 7620, or 8293.

4. The engineered capsid polypeptide of claim 1, wherein the engineered capsid polypeptide is an engineered adeno-associated virus (AAV) capsid polypeptide.

5. The engineered capsid polypeptide of claim 4, wherein the n-mer motif is inserted between two contiguous amino acids in a wild-type AAV capsid polypeptide optionally selected from an AAV-1 capsid polypeptide, an AAV-2 capsid polypeptide, an AAV-3 capsid polypeptide, an AAV-4 capsid polypeptide, an AAV-5 capsid polypeptide, an AAV-6 capsid polypeptide, an AAV-8 capsid polypeptide, an AAV-9 capsid polypeptide, an AAV rh.74 capsid polypeptide, or an AAV rh.10 capsid polypeptide.

6. The engineered capsid polypeptide of claim 5, wherein the n-mer motif is inserted between any two contiguous amino acids of amino acids 262-269, 327-332, 382-386, 452-460, 488-505, 527-539, 545-558, 581-593, or 704-714, optionally between amino acids 588-589, of a wild-type AAV-9 capsid polypeptide or in analogous positions thereto in a wild-type AAV-1 capsid polypeptide, a wild-type AAV-2 capsid polypeptide, a wild-type AAV-3 capsid polypeptide, a wild-type AAV-4 capsid polypeptide, a wild-type AAV-5 capsid polypeptide, a wild-type AAV-6 capsid polypeptide, a wild-type AAV-8 capsid polypeptide, a wild-type AAV-9 capsid polypeptide, a wild-type AAV rh.74 capsid polypeptide, or a wild-type AAV rh.10 capsid polypeptide.

7. The engineered capsid polypeptide of claim 1, wherein the engineered capsid polypeptide is effective to confer a muscle tropism to a capsid or a viral particle.

8. An engineered viral capsid comprising one or more engineered capsid polypeptides of claim 1.

9. An engineered viral particle comprising an engineered viral capsid of claim 8.

10. The engineered viral particle of claim 9, wherein
a. X₁ is selected from L, T, A, M, V, Q, or M;
b. X₂ is selected from T, M, S, N, L, A, or I;
c. X₃ is selected from T, E, N, O, S, Q, Y, A, or D;
d. X₄ is selected from P, Y, K, L, H, T, or S;
e. or any combination of (a)-(d).

11. The engineered viral particle of claim 9, wherein the n-mer motif comprises an amino acid sequence according to any one of SEQ ID NOs: 13-50, 1277-1289, 1291, 1301, 1304, 1313, 1351, 1354, 1363, 1375, 1409, 1427, 1435, 1488, 1592, 1593, 1637, 1657, 1673, 1749, 1761, 1791, 1915, 3737-3748, 3750, 3765-3766, 3788, 3806, 3816, 3844, 4013, 4048, 4083, 4155, 4159, 4213, 4218, 4245, 6647-6659, 6661-6663, 6683, 6702, 6753, 6766, 6782, 6842, 7016, 7058, 7414, 7620, or 8293.

12. The engineered viral particle of claim 9, wherein the engineered capsid polypeptide is an engineered adeno-associated virus (AAV) capsid polypeptide.

13. The engineered viral particle of claim 12, wherein the n-mer motif is inserted between two contiguous amino acids in a wild-type AAV capsid polypeptide, optionally wherein the wild-type AAV capsid polypeptide is an AAV-1 capsid polypeptide, an AAV-2 capsid polypeptide, an AAV-3 capsid polypeptide, an AAV-4 capsid polypeptide, an AAV-5 capsid polypeptide, an AAV-6 capsid polypeptide, an AAV-8 capsid polypeptide, an AAV-9 capsid polypeptide, an AAV rh.74 capsid polypeptide, or an AAV rh.10 capsid polypeptide.

14. The engineered viral particle of claim 13, wherein the n-mer motif is inserted between any two contiguous amino acids of amino acids 262-269, 327-332, 382-386, 452-460, 488-505, 527-539, 545-558, 581-593, or 704-714, optionally between amino acids 588 and 589 of a wild-type AAV-9 capsid polypeptide or in analogous positions thereto in a wild-type AAV-1 capsid polypeptide, a wild-type AAV-2 capsid polypeptide, a wild-type AAV-3 capsid polypeptide, a wild-type AAV-4 capsid polypeptide, a wild-type AAV-5 capsid polypeptide, a wild-type AAV-6 capsid polypeptide, a wild-type AAV-8 capsid polypeptide, a wild-type AAV-9 capsid polypeptide, a wild-type AAV rh.74 capsid. polypeptide, or a wild-type AAV rh.10 capsid polypeptide.

15. The engineered viral particle of claim 9, wherein the engineered viral particle has a muscle tropism.

16. The engineered viral particle of claim 9, further comprising a cargo, wherein the cargo is optionally a polynucleotide, a polypeptide, or both.

17. The engineered viral particle of claim 16, wherein the cargo is effective to treat or prevent a muscle disease.

18. The engineered viral particle of claim 16, wherein the cargo is a genetic modifier, wherein the genetic modifier is optionally a gene editing molecule or system.

19. An engineered polynucleotide comprising: a polynucleotide encoding the engineered capsid polypeptide of claim 1.

20. A vector system comprising:
one or more vectors, wherein at least one of the one or more vectors comprises the polynucleotide of claim 19.

21. A cell comprising the vector system of claim 20.

22. A method of delivering a therapeutic or prevention to a subject, comprising:
administering to a subject an engineered viral particle of claim 16 to the subject.

23. The method of claim 22, wherein the cargo is effective to treat or prevent a muscle disease.

24. The method of claim 22, wherein the cargo is a genetic modifier, wherein the genetic modifier is optionally a gene editing molecule or system.

25. A vector system configured for identifying cell-specific adeno-associated virus (AAV) capsid variants comprising:
a vector comprising:
an adeno-associated (AAV) capsid protein polynucleotide, wherein the AAV capsid protein polynucleotide comprises a 3′ polyadenylation signal, optionally an SV40 polyadenylation signal,
optionally wherein the vector does not comprise splice regulatory elements, comprises minimal splice regulatory elements, comprises a modified splice regulatory element, wherein the modification inactivates the splice regulatory element and optionally wherein the modified splice regulatory element is a polynucleotide sequence sufficient to induce splicing between a rep protein polynucleotide and the AAV capsid protein polynucleotide,
optionally wherein the AAV capsid protein polynucleotide comprises a n-mer motif polynucleotide capable of encoding an n-mer amino acid motif, wherein the n-mer motif comprises three or more amino acids, optionally 3-15 amino acids, wherein the n-mer motif polynucleotide is inserted between two codons in the AAV capsid polynucleotide within a region of the AAV capsid polynucleotide capable of encoding a capsid surface;
optionally an AAV rep protein polynucleotide or portion thereof; and
optionally a single promoter operably coupled to the AAV capsid protein polynucleotide, optional AAV rep protein polynucleotide, or both, wherein the single promoter is the only promoter operably coupled to the AAV capsid protein polynucleotide, AAV rep protein polynucleotide, or both.

26. The vector system of claim 25, wherein the single promoter is a cell-specific promoter, a promoter capable of driving high-titer viral production in the absence of an endogenous AAV promoter, optionally p40, or both.

27. The vector system of claim 25, wherein the n-mer motif has a polypeptide sequence of RGD or RGDXₙ, where n is 3-15 amino acids, optionally 6 or 7 amino acids, and X is any amino acid, where each amino acid present are each independently selected from the group of: any amino acid.

28. The vector system of claim 25, wherein the n-mer motif polynucleotide is inserted between the codons corresponding to any two contiguous amino acids between amino acids 262-269, 327-332, 382-386, 452-460, 488-505, 527-539, 545-558, 581-593, 704-714, or any combination thereof, optionally between amino acids 588 and 589, in an AAV9 capsid polynucleotide or in an analogous position in an AAV2, AAV3, AAV4, AAVS, AAV6, AAV7, AAV8, AAV rh.74 or AAV10 capsid polynucleotide.

29. A method of method of identifying cell-specific adeno-associated virus (AAV) capsid variants, comprising:
a. expressing a vector system as in claim 25 in a cell to produce AAV engineered virus particle capsid variants;
b. harvesting the engineered AAV virus particle capsid variants produced in step (a);
c. administering engineered AAV virus particle capsid variants to one or more first subjects, optionally wherein the one or more first subjects is selected from the group consisting of: a wild-type non-human mammal, a humanized non-human mammal, a disease-specific non-human mammal model, and a non-human primate, and wherein the engineered AAV virus particle capsid variants are produced by expressing a vector system as in claim 25 in a cell and harvesting the engineered AAV virus particle capsid variants produced by the cell; and
d. identifying one or more engineered AAV capsid variants produced at a significantly high level by one or more specific cells or specific cell types in the one or more first subjects.

30. The method of claim 29, further comprising:
e. administering some or all engineered AAV virus particle capsid variants identified in step (d) to one or more second subjects, optionally wherein the one or more second subjects is selected from the group consisting of: a wild-type non-human mammal, a humanized non-human mammal, a disease-specific non-human mammal model, and a non-human primate; and
f. identifying one or more engineered AAV virus particle capsid variants produced at a significantly high level in one or more specific cells or specific cell types in the one or more second subjects.

The application's sequence listing, which the Patent Office published only in electronic form, follows.

SEQUENCE LISTING (8314 sequences)

SEQ ID NO: 1 - protein, 736 aa, Artificial Sequence
  AAV-9 reference seqeunce
MAADGYLPDWLEDNLSEGIREWWALKPGAPQPKANQQHQDNARGLVLPGYKYLGPGNGLDKGEPVNAADAAALEHDKAYDQQLKAGDNPYLKYNHADAEFQERLKEDTSFGGNLGRAVFQAKKRLLEPLGLVEEAAKTAPGKKRPVEQSPQEPDSSAGIGKSGAQPAKKRLNFGQTGDTESVPDPQPIGEPPAAPSGVGSLTMASGGGAPVADNNEGADGVGSSSGNWHCDSQWLGDRVITTSTRTWALPTYNNHLYKQISNSTSGGSSNDNAYFGYSTPWGYFDFNRFHCHFSPRDWQRLINNNWGFRPKRLNFKLFNIQVKEVTDNNGVKTIANNLTSTVQVFTDSDYQLPYVLGSAHEGCLPPFPADVFMIPQYGYLTLNDGSQAVGRSSFYCLEYFPSQMLRTGNNFQFSYEFENVPFHSSYAHSQSLDRLMNPLIDQYLYYLSKTINGSGQNQQTLKFSVAGPSNMAVQGRNYIPGPSYRQQRVSTTVTQNNNSEFAWPGASSWALNGRNSLMNPGPAMASHKEGEDRFFPLSGSLIFGKQGTGRDNVDADKVMITNEEEIKTTNPVATESYGQVATNHQSAQAQAQTGWVQNQGILPGMVWQDRDVYLQGPIWAKIPHTDGNFHPSPLMGGFGMKHPPPQILIKNTPVPADPPTAFNKDKLNSFITQYSTGQVSVEIEWELQKENSKRWNPEIQYTSNYYKSNNVEFAVNTEGVYSEPRPIGTRYLTRNL

SEQ ID NO: 2 - protein, 5 aa, Artificial Sequence
  RGD motif
  MISC_FEATURE (4)..(5): Xaa = any amino acid
RGDXX

SEQ ID NO: 3 - protein, 6 aa, Artificial Sequence
  RGD motif
  MISC_FEATURE (4)..(6): Xaa = any amino acid
RGDXXX

SEQ ID NO: 4 - protein, 7 aa, Artificial Sequence
  RGD motif
  MISC_FEATURE (4)..(8): Xaa = any amino acid
RGDXXXX

SEQ ID NO: 5 - protein, 8 aa, Artificial Sequence
  RGD motif
  MISC_FEATURE (4)..(8): Xaa = any amino acid
RGDXXXXX

SEQ ID NO: 6 - protein, 9 aa, Artificial Sequence
  RGD motif
  MISC_FEATURE (4)..(9): Xaa = any amino acid
RGDXXXXXX

SEQ ID NO: 7 - protein, 10 aa, Artificial Sequence
  RGD motif
  MISC_FEATURE (4)..(10): Xaa = any amino acid
RGDXXXXXXX

SEQ ID NO: 8 - protein, 11 aa, Artificial Sequence
  RGD motif
  MISC_FEATURE (4)..(11): Xaa = any amino acid
RGDXXXXXXXX

SEQ ID NO: 9 - protein, 12 aa, Artificial Sequence
  RGD motif
  MISC_FEATURE (4)..(12): Xaa = any amino acid
RGDXXXXXXXXX

SEQ ID NO: 10 - protein, 13 aa, Artificial Sequence
  RGD motif
  MISC_FEATURE (4)..(13): Xaa = any amino acid
RGDXXXXXXXXXX

SEQ ID NO: 11 - protein, 14 aa, Artificial Sequence
  RGD motif
  MISC_FEATURE (4)..(14): Xaa = any amino acid
RGDXXXXXXXXXXX

SEQ ID NO: 12 - protein, 15 aa, Artificial Sequence
  RGD motif
  MISC_FEATURE (4)..(15): Xaa = any amino acid
RGDXXXXXXXXXXXX

SEQ ID NO: 13 - protein, 7 aa, Artificial Sequence
  n-mer motif
RGDLSTP

SEQ ID NO: 14 - protein, 7 aa, Artificial Sequence
  n-mer motif
RGDLNQY

SEQ ID NO: 15 - protein, 7 aa, Artificial Sequence
  n-mer motif
RGDLTTP

SEQ ID NO: 16 - protein, 7 aa, Artificial Sequence
  n-mer motif
RGDATEL

SEQ ID NO: 17 - protein, 7 aa, Artificial Sequence
  n-mer motif
RGDQLYH

SEQ ID NO: 18 - protein, 7 aa, Artificial Sequence
  n-mer motif
RGDLSTP

SEQ ID NO: 19 - protein, 7 aa, Artificial Sequence
  n-mer motif
RGDVAAK

SEQ ID NO: 20 - protein, 7 aa, Artificial Sequence
  n-mer motif
RGDLTTP

SEQ ID NO: 21 - protein, 7 aa, Artificial Sequence
  n-mer motif
RGDLNQY

SEQ ID NO: 22 - protein, 7 aa, Artificial Sequence
  n-mer motif
RGDTMSK

SEQ ID NO: 23 - protein, 7 aa, Artificial Sequence
  n-mer motif
RGDVAAK

SEQ ID NO: 24 - protein, 7 aa, Artificial Sequence
  n-mer motif
RGDTMSK

SEQ ID NO: 25 - protein, 7 aa, Artificial Sequence
  n-mer motif
RGDATEL

SEQ ID NO: 26 - protein, 7 aa, Artificial Sequence
  n-mer motif
RGDLTTP

SEQ ID NO: 27 - protein, 7 aa, Artificial Sequence
  n-mer motif
RGDLNQY

SEQ ID NO: 28 - protein, 7 aa, Artificial Sequence
  n-mer motif
RGDLSTP

SEQ ID NO: 29 - protein, 7 aa, Artificial Sequence
  n-mer motif
RGDQLYH

SEQ ID NO: 30 - protein, 7 aa, Artificial Sequence
  n-mer motif
RGDTMSK

SEQ ID NO: 31 - protein, 7 aa, Artificial Sequence
  n-mer motif
RGDATEL

SEQ ID NO: 32 - protein, 7 aa, Artificial Sequence
  n-mer motif
RGDLSTP

SEQ ID NO: 33 - protein, 7 aa, Artificial Sequence
  n-mer motif
RGDMINT

SEQ ID NO: 34 - protein, 7 aa, Artificial Sequence
  n-mer motif
RGDLNQY

SEQ ID NO: 35 - protein, 7 aa, Artificial Sequence
  n-mer motif
RGDTMSK

SEQ ID NO: 36 - protein, 7 aa, Artificial Sequence
  n-mer motif
RGDLTTP

SEQ ID NO: 37 - protein, 7 aa, Artificial Sequence
  n-mer motif
RGDLNDS

SEQ ID NO: 38 - protein, 7 aa, Artificial Sequence
  n-mer motif
RGDLSTP

SEQ ID NO: 39 - protein, 7 aa, Artificial Sequence
  n-mer motif
RGDLSTP

SEQ ID NO: 40 - protein, 7 aa, Artificial Sequence
  n-mer motif
RGDLTTP

SEQ ID NO: 41 - protein, 7 aa, Artificial Sequence
  n-mer motif
RGDLNQY

SEQ ID NO: 42 - protein, 7 aa, Artificial Sequence
  n-mer motif
RGDQLYH

SEQ ID NO: 43 - protein, 7 aa, Artificial Sequence
  n-mer motif
RGDATEL

SEQ ID NO: 44 - protein, 7 aa, Artificial Sequence
  n-mer motif
RGDTMSK

SEQ ID NO: 45 - protein, 7 aa, Artificial Sequence
  n-mer motif
RGDLNQY

SEQ ID NO: 46 - protein, 7 aa, Artificial Sequence
  n-mer motif
RGDLTTP

SEQ ID NO: 47 - protein, 7 aa, Artificial Sequence
  n-mer motif
RGDMINT

SEQ ID NO: 48 - protein, 7 aa, Artificial Sequence
  n-mer motif
RGDTMSK

SEQ ID NO: 49 - protein, 7 aa, Artificial Sequence
  n-mer motif
RGDTMNY

SEQ ID NO: 50 - protein, 7 aa, Artificial Sequence
  n-mer motif
RGDATEL

SEQ ID NO: 51 - DNA, 12 bp, Artificial Sequence
  stemloop 2
acttgtttaagt

SEQ ID NO: 52 - DNA, 12 bp, Artificial Sequence
  stemloop 2
  misc_feature (1)..(4): n represents any set of nucleotides that are complementary to and together will base pair to nucleotides 9-12, where n is a, c, g, t or u
  misc_feature (9)..(12): n represents any set of nucleotides that are complementary to and together will base pair to nucleotides 1-4, where n is a, c, g, t or u
nnnngtttnnnn

SEQ ID NO: 53 - DNA, 16 bp, Artificial Sequence
  stemloop3
ggcaccgagtcggtgc

SEQ ID NO: 54 - DNA, 17 bp, Artificial Sequence
  stemloop3
  MISC_FEATURE (1)..(7): n represents any set of nucleotides that are complementary to and together will base pair to nucleotides 11-17, where n is a, c, g, t or u
  MISC_FEATURE (11)..(17): n represents any set of nucleotides that are complementary to and together will base pair to nucleotides 1-7, where n is a, c, g, t or u
nnnnnnnagtnnnnnnn

SEQ ID NO: 55 - DNA, 30 bp, Artificial Sequence
  DR:tracrRNA duplex
  MISC_FEATURE (8)..(8): n represents part of the bulge of the duplex, where n is a, c, g, t or u
  MISC_FEATURE (9)..(12): n represents any set of nucleotides that are complementary to and together will base pair to nucleotides 17-20, where n is a, c, g, t or u
  MISC_FEATURE (13)..(16): n represents a linker of any length and any base composition so long as it does not alter the overall structure of the duplex
  MISC_FEATURE (17)..(20): n represents any set of nucleotides that are complementary to and together will base pair to nucleotides 9-12, where n is a, c, g, t or u
  MISC_FEATURE (21)..(23): part of the bulge in the duplex
gyyyyagnnnnnnnnnnnnnaanuurrrru

SEQ ID NO: 56 - protein, 15 aa, Artificial Sequence
  linker
GGGGSGGGGSGGGGS

SEQ ID NO: 57 - protein, 30 aa, Artificial Sequence
  linker
GGGGSGGGGSGGGGSGGGGSGGGGSGGGGS

SEQ ID NO: 58 - protein, 45 aa, Artificial Sequence
  linker
GGGGSGGGGSGGGGSGGGGSGGGGSGGGGSGGGGSGGGGSGGGGS

SEQ ID NO: 59 - protein, 60 aa, Artificial Sequence
  linker
GGGGSGGGGSGGGGSGGGGSGGGGSGGGGSGGGGSGGGGSGGGGSGGGGSGGGGSGGGGS

SEQ ID NO: 60 - DNA, 21 bp, Artificial Sequence
  n-mer motif encoding polynucleotide
aggggtgatctttctacgcct

SEQ ID NO: 61 - DNA, 21 bp, Artificial Sequence
  n-mer motif encoding polynucleotide
aggggcgacctgaaccaatac

SEQ ID NO: 62 - DNA, 21 bp, Artificial Sequence
  n-mer motif encoding polynucleotide
cggggtgatcttactacgcct

SEQ ID NO: 63 - DNA, 21 bp, Artificial Sequence
  n-mer motif encoding polynucleotide
aggggggatgcgacggagctt

SEQ ID NO: 64 - DNA, 21 bp, Artificial Sequence
  n-mer motif encoding polynucleotide
cggggtgatcagctttatcat

SEQ ID NO: 65 - DNA, 21 bp, Artificial Sequence
  n-mer motif encoding polynucleotide
agaggcgacttatccacaccc

SEQ ID NO: 66 - DNA, 21 bp, Artificial Sequence
  n-mer motif encoding polynucleotide
cgtggtgatgtggcggctaag

SEQ ID NO: 67 - DNA, 21 bp, Artificial Sequence
  n-mer motif encoding polynucleotide
agaggagacttgacaacccca

SEQ ID NO: 68 - DNA, 21 bp, Artificial Sequence
  n-mer motif encoding polynucleotide
cggggtgatcttaatcagtat

SEQ ID NO: 69 - DNA, 21 bp, Artificial Sequence
  n-mer motif encoding polynucleotide
cgaggagacaccatgagcaaa

SEQ ID NO: 70 - DNA, 21 bp, Artificial Sequence
  n-mer motif encoding polynucleotide
cgcggagacgtagccgccaaa

SEQ ID NO: 71 - DNA, 21 bp, Artificial Sequence
  n-mer motif encoding polynucleotide
cggggggatactatgtctaag

SEQ ID NO: 72 - DNA, 21 bp, Artificial Sequence
  n-mer motif encoding polynucleotide
cggggtgacgcaacagaattg

SEQ ID NO: 73 - DNA, 21 bp, Artificial Sequence
  n-mer motif encoding polynucleotide
gcacggtcaaacgactcggtc

SEQ ID NO: 74 - DNA, 21 bp, Artificial Sequence
  n-mer motif encoding polynucleotide
cggggtgacatgaacaactca

SEQ ID NO: 75 - DNA, 21 bp, Artificial Sequence
  n-mer motif encoding polynucleotide
acgatgggtgctaatggtact

SEQ ID NO: 76 - DNA, 21 bp, Artificial Sequence
  n-mer motif encoding polynucleotide
cctaatgttacgcagtcttat

SEQ ID NO: 77 - DNA, 21 bp, Artificial Sequence
  n-mer motif encoding polynucleotide
cgtttggacctgcaagtccac

SEQ ID NO: 78 - DNA, 21 bp, Artificial Sequence
  n-mer motif encoding polynucleotide
gggctttctaaggcgtctgat

SEQ ID NO: 79 - DNA, 21 bp, Artificial Sequence
  n-mer motif encoding polynucleotide
gatcctggtcggacgggtacg

SEQ ID NO: 80 - DNA, 21 bp, Artificial Sequence
  n-mer motif encoding polynucleotide
tatcggggtagggaggattgg

SEQ ID NO: 81 - DNA, 21 bp, Artificial Sequence
  n-mer motif encoding polynucleotide
agatacggagaatccatcgaa

SEQ ID NO: 82 - DNA, 21 bp, Artificial Sequence
  n-mer motif encoding polynucleotide
agtctgaacaacatgggatcg

SEQ ID NO: 83 - DNA, 21 bp, Artificial Sequence
  n-mer motif encoding polynucleotide
aatagtgatcagcggaattgg

SEQ ID NO: 84 - DNA, 21 bp, Artificial Sequence
  n-mer motif encoding polynucleotide
cgtggtgatatgtctcgtgag

SEQ ID NO: 85 - DNA, 21 bp, Artificial Sequence
  n-mer motif encoding polynucleotide
atgactgatgcgaataggatt

SEQ ID NO: 86 - DNA, 21 bp, Artificial Sequence
  n-mer motif encoding polynucleotide
gtctacaacggcaacgtagta

SEQ ID NO: 87 - DNA, 21 bp, Artificial Sequence
  n-mer motif encoding polynucleotide
cgtggggatatgattaatacg

SEQ ID NO: 88 - DNA, 21 bp, Artificial Sequence
  n-mer motif encoding polynucleotide
agtggtctttcgcatggtcag

SEQ ID NO: 89 - DNA, 21 bp, Artificial Sequence
  n-mer motif encoding polynucleotide
actggccaattagtaggaacc

SEQ ID NO: 90 - DNA, 21 bp, Artificial Sequence
  n-mer motif encoding polynucleotide
gctaattctattgggggtccg

SEQ ID NO: 91 - DNA, 21 bp, Artificial Sequence
  n-mer motif encoding polynucleotide
tacagtcaatcgctgtctgaa

SEQ ID NO: 92 - DNA, 21 bp, Artificial Sequence
  n-mer motif encoding polynucleotide
tatcataagtatagtacggat

SEQ ID NO: 93 - DNA, 21 bp, Artificial Sequence
  n-mer motif encoding polynucleotide
gctcgtcatgatgagcatgtg

SEQ ID NO: 94 - DNA, 21 bp, Artificial Sequence
  n-mer motif encoding polynucleotide
gccatagactctatcaaacaa

SEQ ID NO: 95 - DNA, 21 bp, Artificial Sequence
  n-mer motif encoding polynucleotide
cgtttggacctgcaagtcaac

SEQ ID NO: 96 - DNA, 21 bp, Artificial Sequence
  n-mer motif encoding polynucleotide
cgcggcgacatgataaacacc

SEQ ID NO: 97 - DNA, 21 bp, Artificial Sequence
  n-mer motif encoding polynucleotide
agtgtgttgtctcaggctaat

SEQ ID NO: 98 - DNA, 21 bp, Artificial Sequence
  n-mer motif encoding polynucleotide
tttacggtgaatcaggatctt

SEQ ID NO: 99 - DNA, 21 bp, Artificial Sequence
  n-mer motif encoding polynucleotide
acggataatggtcttcttgtg

SEQ ID NO: 100 - DNA, 21 bp, Artificial Sequence
  n-mer motif encoding polynucleotide
tatcagcagacttctagtacg

SEQ ID NO: 101 - DNA, 21 bp, Artificial Sequence
  n-mer motif encoding polynucleotide
acagaacaatcttactcacga

SEQ ID NO: 102 - DNA, 21 bp, Artificial Sequence
  n-mer motif encoding polynucleotide
attatggggcttagtcaggct

SEQ ID NO: 103 - DNA, 21 bp, Artificial Sequence
  n-mer motif encoding polynucleotide
gctactgcgcatcaggatggt

SEQ ID NO: 104 - DNA, 21 bp, Artificial Sequence
  n-mer motif encoding polynucleotide
tataatgctactccttcgcag

SEQ ID NO: 105 - DNA, 21 bp, Artificial Sequence
  n-mer motif encoding polynucleotide
tatacgcagggtattatgaat

SEQ ID NO: 106 - DNA, 21 bp, Artificial Sequence
  n-mer motif encoding polynucleotide
gaatccctcccaatctctaaa

SEQ ID NO: 107 - DNA, 21 bp, Artificial Sequence
  n-mer motif encoding polynucleotide
ggcaccgtcgttccgggctcc

SEQ ID NO: 108 - DNA, 21 bp, Artificial Sequence
  n-mer motif encoding polynucleotide
ggattagctagtctacacctg

SEQ ID NO: 109 - DNA, 21 bp, Artificial Sequence
  n-mer motif encoding polynucleotide
tatattgctgcgggtgagcag

SEQ ID NO: 110 - DNA, 21 bp, Artificial Sequence
  n-mer motif encoding polynucleotide
aacacctaccccttcaacgcc

SEQ ID NO: 111 - DNA, 21 bp, Artificial Sequence
  n-mer motif encoding polynucleotide
gttggtgcgagtacggcttcg

SEQ ID NO: 112 - DNA, 21 bp, Artificial Sequence
  n-mer motif encoding polynucleotide
ggatccaactacttagcaaac

SEQ ID NO: 113 - DNA, 21 bp, Artificial Sequence
  n-mer motif encoding polynucleotide
gatactggtcggacgggtacg

SEQ ID NO: 114 - DNA, 21 bp, Artificial Sequence
  n-mer motif encoding polynucleotide
aagccgaatacgatgagtgat

SEQ ID NO: 115 - DNA, 21 bp, Artificial Sequence
  n-mer motif encoding polynucleotide
gtagacaaatctagcccagtg

SEQ ID NO: 116 - DNA, 21 bp, Artificial Sequence
  n-mer motif encoding polynucleotide
agttcggacccaaaaggtcaa

SEQ ID NO: 117 - DNA, 21 bp, Artificial Sequence
  n-mer motif encoding polynucleotide
tggcagacgaatggtatgcag

SEQ ID NO: 118 - DNA, 21 bp, Artificial Sequence
  n-mer motif encoding polynucleotide
accggtagcttgaactctatg

SEQ ID NO: 119 - DNA, 21 bp, Artificial Sequence
  n-mer motif encoding polynucleotide
cattctaattcgagtcagaat

SEQ ID NO: 120 - DNA, 21 bp, Artificial Sequence
  n-mer motif encoding polynucleotide
ggccgtgacgacctcacaaac

SEQ ID NO: 121 - DNA, 21 bp, Artificial Sequence
  n-mer motif encoding polynucleotide
gatacttataagggtaagtgg

SEQ ID NO: 122 - DNA, 21 bp, Artificial Sequence
  n-mer motif encoding polynucleotide
tatacggcgcagaccggctgg

SEQ ID NO: 123 - DNA, 21 bp, Artificial Sequence
  n-mer motif encoding polynucleotide
aatcaggtgggtgcgtctgcg

SEQ ID NO: 124 - DNA, 21 bp, Artificial Sequence
  n-mer motif encoding polynucleotide
atcgacgtactgaacggaagt

SEQ ID NO: 125 - DNA, 21 bp, Artificial Sequence
  n-mer motif encoding polynucleotide
tttcggacggtgtatactggt

SEQ ID NO: 126 - DNA, 21 bp, Artificial Sequence
  n-mer motif encoding polynucleotide
ggaaacatggtgactccaaac

SEQ ID NO: 127 - DNA, 21 bp, Artificial Sequence
  n-mer motif encoding polynucleotide
gatacttataacggtaagtgg

SEQ ID NO: 128 - DNA, 21 bp, Artificial Sequence
  n-mer motif encoding polynucleotide
accatccaagaccacataaaa

SEQ ID NO: 129 - DNA, 21 bp, Artificial Sequence
  n-mer motif encoding polynucleotide
ggagcaaaaggaaccatgggc

SEQ ID NO: 130 - DNA, 21 bp, Artificial Sequence
  n-mer motif encoding polynucleotide
acgaggagcaactccgacgaa

SEQ ID NO: 131 - DNA, 21 bp, Artificial Sequence
  n-mer motif encoding polynucleotide
gctactactcttactggtgat

SEQ ID NO: 132 - DNA, 21 bp, Artificial Sequence
  n-mer motif encoding polynucleotide
tcatacggaggatctggcccc

SEQ ID NO: 133 - DNA, 21 bp, Artificial Sequence
  n-mer motif encoding polynucleotide
gaaaaatccgtcgaatccaaa

SEQ ID NO: 134 - DNA, 21 bp, Artificial Sequence
  n-mer motif encoding polynucleotide
cgaggcgacacaatgaactac

SEQ ID NO: 135 - DNA, 21 bp, Artificial Sequence
  n-mer motif encoding polynucleotide
cgggatctggggcagaccggc

SEQ ID NO: 136 - DNA, 21 bp, Artificial Sequence
  n-mer motif encoding polynucleotide
agtccgcagctgagtgtgatg

SEQ ID NO: 137 - DNA, 21 bp, Artificial Sequence
  n-mer motif encoding polynucleotide
cgaggagacaacagcacaccg

SEQ ID NO: 138 - DNA, 21 bp, Artificial Sequence
  n-mer motif encoding polynucleotide
cctatggcaggacaccccccg

SEQ ID NO: 139 - DNA, 21 bp, Artificial Sequence
  n-mer motif encoding polynucleotide
acggcgtatcaggctggtctg

SEQ ID NO: 140 - DNA, 21 bp, Artificial Sequence
  n-mer motif encoding polynucleotide
gtggtaaaccaaggaaaccaa

SEQ ID NO: 141 - DNA, 21 bp, Artificial Sequence
  n-mer motif encoding polynucleotide
gataagactgagatgctgcag

SEQ ID NO: 142 - DNA, 21 bp, Artificial Sequence
  n-mer motif encoding polynucleotide
actgtgatgatgagtacgagg

SEQ ID NO: 143 - DNA, 21 bp, Artificial Sequence
  n-mer motif encoding polynucleotide
cagcagaatacgcgtttgccg

SEQ ID NO: 144 - DNA, 21 bp, Artificial Sequence
  n-mer motif encoding polynucleotide
taccaacacaaccaagcccac

SEQ ID NO: 145 - DNA, 21 bp, Artificial Sequence
  n-mer motif encoding polynucleotide
aatcagagtattaataatatt

SEQ ID NO: 146 - DNA, 21 bp, Artificial Sequence
  n-mer motif encoding polynucleotide
cgaggagaccacagcacaccg

SEQ ID NO: 147 - DNA, 21 bp, Artificial Sequence
  n-mer motif encoding polynucleotide
gactctacacttcacttaagt

SEQ ID NO: 148 - DNA, 21 bp, Artificial Sequence
  n-mer motif encoding polynucleotide
gcgaacatagaaaacacgtca

SEQ ID NO: 149 - DNA, 21 bp, Artificial Sequence
  n-mer motif encoding polynucleotide
acaaacgctgctctagtacca

SEQ ID NO: 150 - DNA, 21 bp, Artificial Sequence
  n-mer motif encoding polynucleotide
gggcagaaggagactactgcg

SEQ ID NO: 151 - DNA, 21 bp, Artificial Sequence
  n-mer motif encoding polynucleotide
gaacttaacaccgcacacgca

SEQ ID NO: 152 - DNA, 21 bp, Artificial Sequence
  n-mer motif encoding polynucleotide
ggtgttagtagtaattctgcg

SEQ ID NO: 153 - DNA, 21 bp, Artificial Sequence
  n-mer motif encoding polynucleotide
agcacaaacgcgggacaaagg

SEQ ID NO: 154 - DNA, 21 bp, Artificial Sequence
  n-mer motif encoding polynucleotide
gaacaacaaaaaacagacaac

SEQ ID NO: 155 - DNA, 21 bp, Artificial Sequence
  n-mer motif encoding polynucleotide
gctgttgtgaatgagaatatg

SEQ ID NO: 156 - DNA, 21 bp, Artificial Sequence
  n-mer motif encoding polynucleotide
ggcagcgtcagcaccagcgca

SEQ ID NO: 157 - DNA, 21 bp, Artificial Sequence
  n-mer motif encoding polynucleotide
gagttgggtagtcagcgtatg

SEQ ID NO: 158 - DNA, 21 bp, Artificial Sequence
  n-mer motif encoding polynucleotide
agaggcgacttatccacacac

SEQ ID NO: 159 - DNA, 21 bp, Artificial Sequence
  n-mer motif encoding polynucleotide
gaccaccaacaagccctagct

SEQ ID NO: 160 - DNA, 21 bp, Artificial Sequence
  n-mer motif encoding polynucleotide
aacagatctgacgctcacgaa

SEQ ID NO: 161 - DNA, 21 bp, Artificial Sequence
  n-mer motif encoding polynucleotide
aatgttaatgcgcagagtagg

SEQ ID NO: 162 - DNA, 21 bp, Artificial Sequence
  n-mer motif encoding polynucleotide
acccaagggaacaacatggta

SEQ ID NO: 163 - DNA, 21 bp, Artificial Sequence
  n-mer motif encoding polynucleotide
acggcgctgaatacgtatcct

SEQ ID NO: 164 - DNA, 21 bp, Artificial Sequence
  n-mer motif encoding polynucleotide
gtctctacatacctcctggca

SEQ ID NO: 165 - DNA, 21 bp, Artificial Sequence
  n-mer motif encoding polynucleotide
ggcggcaactacaacacaact

SEQ ID NO: 166 - DNA, 21 bp, Artificial Sequence
  n-mer motif encoding polynucleotide
agtaatattaagccggagatt

SEQ ID NO: 167 - DNA, 21 bp, Artificial Sequence
  n-mer motif encoding polynucleotide
ccgagggtgcatggtcaggtt

SEQ ID NO: 168 - DNA, 21 bp, Artificial Sequence
  n-mer motif encoding polynucleotide
tctaattctaatactgctgct

SEQ ID NO: 169 - DNA, 21 bp, Artificial Sequence
  n-mer motif encoding polynucleotide
cttgaggtggcgacgagtccg

SEQ ID NO: 170 - DNA, 21 bp, Artificial Sequence
  n-mer motif encoding polynucleotide
cacgacgccgacaaattagct

SEQ ID NO: 171 - DNA, 21 bp, Artificial Sequence
  n-mer motif encoding polynucleotide
ggtgtgtatattgatggtcgg

SEQ ID NO: 172 - DNA, 21 bp, Artificial Sequence
  n-mer motif encoding polynucleotide
tcgatgcagtcgtatacgatg

SEQ ID NO: 173 - DNA, 21 bp, Artificial Sequence
  n-mer motif encoding polynucleotide
tctaaaggaaacgaacaaatg

SEQ ID NO: 174 - DNA, 21 bp, Artificial Sequence
  n-mer motif encoding polynucleotide
ggtcgggattatgctatgagt

SEQ ID NO: 175 - DNA, 21 bp, Artificial Sequence
  n-mer motif encoding polynucleotide
actgatggtatttttcagcct

SEQ ID NO: 176 - DNA, 21 bp, Artificial Sequence
  n-mer motif encoding polynucleotide
gggagcccagtgatagtaaac

SEQ ID NO: 177 - DNA, 21 bp, Artificial Sequence
  n-mer motif encoding polynucleotide
acattaacagacgttcaccga

SEQ ID NO: 178 - DNA, 21 bp, Artificial Sequence
  n-mer motif encoding polynucleotide
aaaagcgaagtacccgcccga

SEQ ID NO: 179 - DNA, 21 bp, Artificial Sequence
  n-mer motif encoding polynucleotide
gtcaacactggcgcactcttg

SEQ ID NO: 180 - DNA, 21 bp, Artificial Sequence
  n-mer motif encoding polynucleotide
agtcagcagggttttactctg

SEQ ID NO: 181 - DNA, 21 bp, Artificial Sequence
  n-mer motif encoding polynucleotide
aataataagtctgtgccggat

SEQ ID NO: 182 - DNA, 21 bp, Artificial Sequence
  n-mer motif encoding polynucleotide
agtgtgatggtgggtacgaat

SEQ ID NO: 183 - DNA, 21 bp, Artificial Sequence
  n-mer motif encoding polynucleotide
cgaaacgaaaacacttacaac

SEQ ID NO: 184 - DNA, 21 bp, Artificial Sequence
  n-mer motif encoding polynucleotide
caagctaacttatcaataatc

SEQ ID NO: 185 - DNA, 21 bp, Artificial Sequence
  n-mer motif encoding polynucleotide
cccggacgggacagcagaacg

SEQ ID NO: 186 - DNA, 21 bp, Artificial Sequence
  n-mer motif encoding polynucleotide
tttccggctaatggtggtgct

SEQ ID NO: 187 - DNA, 21 bp, Artificial Sequence
  n-mer motif encoding polynucleotide
gctggtaaggatcttagtaat

SEQ ID NO: 188 - DNA, 21 bp, Artificial Sequence
  n-mer motif encoding polynucleotide
gcacaattcgaatcaggccga

SEQ ID NO: 189 - DNA, 21 bp, Artificial Sequence
  n-mer motif encoding polynucleotide
ggatacggcagttacagcaac

SEQ ID NO: 190 - DNA, 21 bp, Artificial Sequence
  n-mer motif encoding polynucleotide
acaatcgtttccgcttacgcc

SEQ ID NO: 191 - DNA, 21 bp, Artificial Sequence
  n-mer motif encoding polynucleotide
aatgtgagtcctaatttgact

SEQ ID NO: 192 - DNA, 21 bp, Artificial Sequence
  n-mer motif encoding polynucleotide
agaggcgacttatcaacaccc

SEQ ID NO: 193 - DNA, 21 bp, Artificial Sequence
  n-mer motif encoding polynucleotide
ttcttagaaggagtcgctcaa

SEQ ID NO: 194 - DNA, 21 bp, Artificial Sequence
  n-mer motif encoding polynucleotide
ggctccgaacgaggagaacga

SEQ ID NO: 195 - DNA, 21 bp, Artificial Sequence
  n-mer motif encoding polynucleotide
ttgaatgttggttcgagtctt

SEQ ID NO: 196 - DNA, 21 bp, Artificial Sequence
  n-mer motif encoding polynucleotide
cgtattgtggctaatgagcag

SEQ ID NO: 197 - DNA, 21 bp, Artificial Sequence
  n-mer motif encoding polynucleotide
caatctatcggccaccccgtt

SEQ ID NO: 198 - DNA, 21 bp, Artificial Sequence
  n-mer motif encoding polynucleotide
ggtggtatgtcggcgcattcg

SEQ ID NO: 199 - DNA, 21 bp, Artificial Sequence
  n-mer motif encoding polynucleotide
cattctacgacgtctatgacg

SEQ ID NO: 200 - DNA, 21 bp, Artificial Sequence
  n-mer motif encoding polynucleotide
actgtaaacggtacgaacgta

SEQ ID NO: 201 - DNA, 21 bp, Artificial Sequence
  n-mer motif encoding polynucleotide
cttgcgcctgataatattggg

SEQ ID NO: 202 - DNA, 21 bp, Artificial Sequence
  n-mer motif encoding polynucleotide
caaacagcgactctcgtggca

SEQ ID NO: 203 - DNA, 21 bp, Artificial Sequence
  n-mer motif encoding polynucleotide
gcatcagcaccgtctgaattc

SEQ ID NO: 204 - DNA, 21 bp, Artificial Sequence
  n-mer motif encoding polynucleotide
tcgatggagggtcagcagcat

SEQ ID NO: 205 - DNA, 21 bp, Artificial Sequence
  n-mer motif encoding polynucleotide
caagacgtaggacgcacgaac

SEQ ID NO: 206 - DNA, 21 bp, Artificial Sequence
  n-mer motif encoding polynucleotide
gtctacaacggcaacgaagta

SEQ ID NO: 207 - DNA, 21 bp, Artificial Sequence
  n-mer motif encoding polynucleotide
gcacaggcgcagacaggctgg

SEQ ID NO: 208 - DNA, 21 bp, Artificial Sequence
  n-mer motif encoding polynucleotide
cggctggatctgacgcatacg

SEQ ID NO: 209 - DNA, 21 bp, Artificial Sequence
  n-mer motif encoding polynucleotide
gctgcacacggccgcgaacaa

SEQ ID NO: 210 - DNA, 21 bp, Artificial Sequence
  n-mer motif encoding polynucleotide
agaggcgacttatacacaccc

SEQ ID NO: 211 - DNA, 21 bp, Artificial Sequence
  n-mer motif encoding polynucleotide
ggtatgcagcagagggagaag

SEQ ID NO: 212 - DNA, 21 bp, Artificial Sequence
  n-mer motif encoding polynucleotide
cagactcaggcgagtactaat

SEQ ID NO: 213 - DNA, 21 bp, Artificial Sequence
  n-mer motif encoding polynucleotide
cgggacaccaacgccctcgga

SEQ ID NO: 214 - DNA, 21 bp, Artificial Sequence
  n-mer motif encoding polynucleotide
tcgagtcagatttctaatagt

SEQ ID NO: 215 - DNA, 21 bp, Artificial Sequence
  n-mer motif encoding polynucleotide
cagtcggttaatagtacgagt

SEQ ID NO: 216 - DNA, 21 bp, Artificial Sequence
  n-mer motif encoding polynucleotide
gctctggagagggctcagtat

SEQ ID NO: 217 - DNA, 21 bp, Artificial Sequence
  n-mer motif encoding polynucleotide
catactgggcatagttctgtg

SEQ ID NO: 218 - DNA, 21 bp, Artificial Sequence
  n-mer motif encoding polynucleotide
cggggagacatgacccgagca

SEQ ID NO: 219 - DNA, 21 bp, Artificial Sequence
  n-mer motif encoding polynucleotide
tttcagcgtgatcttgggcat

SEQ ID NO: 220 - DNA, 21 bp, Artificial Sequence
  n-mer motif encoding polynucleotide
acaaccggcgacataatacgc

SEQ ID NO: 221 - DNA, 21 bp, Artificial Sequence
  n-mer motif encoding polynucleotide
tcttttcagacggatcgtgcg

SEQ ID NO: 222 - DNA, 21 bp, Artificial Sequence
  n-mer motif encoding polynucleotide
caatccagcgacggccgagtg

SEQ ID NO: 223 - DNA, 21 bp, Artificial Sequence
  n-mer motif encoding polynucleotide
acttctggggctttgacccgg

SEQ ID NO: 224 - DNA, 21 bp, Artificial Sequence
  n-mer motif encoding polynucleotide
aattcgaatactgtgaatacg

SEQ ID NO: 225 - DNA, 21 bp, Artificial Sequence
  n-mer motif encoding polynucleotide
atctccggtagtagcagtcta

SEQ ID NO: 226 - DNA, 21 bp, Artificial Sequence
  n-mer motif encoding polynucleotide
aacgacaaatcaaccaacgta

SEQ ID NO: 227 - DNA, 21 bp, Artificial Sequence
  n-mer motif encoding polynucleotide
atcgtacttgctcccacatcg

SEQ ID NO: 228 - DNA, 21 bp, Artificial Sequence
  n-mer motif encoding polynucleotide
tcaggcgtcaactacggtgtc

SEQ ID NO: 229 - DNA, 21 bp, Artificial Sequence
  n-mer motif encoding polynucleotide
gtcggcgcccaacgggacccc

SEQ ID NO: 230 - DNA, 21 bp, Artificial Sequence
  n-mer motif encoding polynucleotide
acgggtatgaatagtaataag

SEQ ID NO: 231 - DNA, 21 bp, Artificial Sequence
  n-mer motif encoding polynucleotide
atcgaagcctactcacgagac

SEQ ID NO: 232 - DNA, 21 bp, Artificial Sequence
  n-mer motif encoding polynucleotide
ttacacacaacactaatgccc

SEQ ID NO: 233 - DNA, 21 bp, Artificial Sequence
  n-mer motif encoding polynucleotide
tctgataatcatctgaagact

SEQ ID NO: 234 - DNA, 21 bp, Artificial Sequence
  n-mer motif encoding polynucleotide
cgaaacgaagacaaaggagga

SEQ ID NO: 235 - DNA, 21 bp, Artificial Sequence
  n-mer motif encoding polynucleotide
acgaagggtgctaatggtact

SEQ ID NO: 236 - DNA, 21 bp, Artificial Sequence
  n-mer motif encoding polynucleotide
gtctacaacggcaacgtagaa

SEQ ID NO: 237 - DNA, 21 bp, Artificial Sequence
  n-mer motif encoding polynucleotide
tcaaacagcggaggcaaccac

SEQ ID NO: 238 - DNA, 21 bp, Artificial Sequence
  n-mer motif encoding polynucleotide
gtagccgcgggaccagaagcg

SEQ ID NO: 239 - DNA, 21 bp, Artificial Sequence
  n-mer motif encoding polynucleotide
acgtctcttagtggtagtgcg

SEQ ID NO: 240 - DNA, 21 bp, Artificial Sequence
  n-mer motif encoding polynucleotide
gttgggctgcagagtaatact

SEQ ID NO: 241 - DNA, 21 bp, Artificial Sequence
  n-mer motif encoding polynucleotide
cacaccgcccacagcgtggac

SEQ ID NO: 242 - DNA, 21 bp, Artificial Sequence
  n-mer motif encoding polynucleotide
aacgtgggaatgagctcaacc

SEQ ID NO: 243 - DNA, 21 bp, Artificial Sequence
  n-mer motif encoding polynucleotide
catgcggatgtgaatgctggg

SEQ ID NO: 244 - DNA, 21 bp, Artificial Sequence
  n-mer motif encoding polynucleotide
aaagcgggacaactagtggaa

SEQ ID NO: 245 - DNA, 21 bp, Artificial Sequence
  n-mer motif encoding polynucleotide
agtacttttagtgtgctgcct

SEQ ID NO: 246 - DNA, 21 bp, Artificial Sequence
  n-mer motif encoding polynucleotide
cctcagtctccgagtcgggtt

SEQ ID NO: 247 - DNA, 21 bp, Artificial Sequence
  n-mer motif encoding polynucleotide
cacaccgccacccttagcagc

SEQ ID NO: 248 - DNA, 21 bp, Artificial Sequence
  n-mer motif encoding polynucleotide
cttccgcgtcatgatcagtat

SEQ ID NO: 249 - DNA, 21 bp, Artificial Sequence
  n-mer motif encoding polynucleotide
caagtgaacaacccactcaca

SEQ ID NO: 250 - DNA, 21 bp, Artificial Sequence
  n-mer motif encoding polynucleotide
acaacagaaaccgcacgaggt

SEQ ID NO: 251 - DNA, 21 bp, Artificial Sequence
  n-mer motif encoding polynucleotide
gttcatgggacgttgacttat

SEQ ID NO: 252 - DNA, 21 bp, Artificial Sequence
  n-mer motif encoding polynucleotide
tatagtactgatcttaggatg

SEQ ID NO: 253 - DNA, 21 bp, Artificial Sequence
  n-mer motif encoding polynucleotide
gcacacgctacctcaagcact

SEQ ID NO: 254 - DNA, 21 bp, Artificial Sequence
  n-mer motif encoding polynucleotide
agggagagtgctgctctggcg

SEQ ID NO: 255 - DNA, 21 bp, Artificial Sequence
  n-mer motif encoding polynucleotide
aaggatactaatcagcagatt

SEQ ID NO: 256 - DNA, 21 bp, Artificial Sequence
  n-mer motif encoding polynucleotide
agtatgcaatcatacaccatg

SEQ ID NO: 257 - DNA, 21 bp, Artificial Sequence
  n-mer motif encoding polynucleotide
acagcctactcgcccacagtc

SEQ ID NO: 258 - DNA, 21 bp, Artificial Sequence
  n-mer motif encoding polynucleotide
gaatctgcccaccaaagaata

SEQ ID NO: 259 - DNA, 21 bp, Artificial Sequence
  n-mer motif encoding polynucleotide
agatacacaacagcacaacaa

SEQ ID NO: 260 - DNA, 21 bp, Artificial Sequence
  n-mer motif encoding polynucleotide
acgtctgtggcgaatgtgagt

SEQ ID NO: 261 - DNA, 21 bp, Artificial Sequence
  n-mer motif encoding polynucleotide
agggatcagcatacttctatt

SEQ ID NO: 262 - DNA, 21 bp, Artificial Sequence
  n-mer motif encoding polynucleotide
tctgttacgtcttctggtccg

SEQ ID NO: 263 - DNA, 21 bp, Artificial Sequence
  n-mer motif encoding polynucleotide
gcggttgttctgaatagtaat

SEQ ID NO: 264 - DNA, 21 bp, Artificial Sequence
  n-mer motif encoding polynucleotide
cctgggaatccgtctagtaat

SEQ ID NO: 265 - DNA, 21 bp, Artificial Sequence
  n-mer motif encoding polynucleotide
acggggtctactactcagctt

SEQ ID NO: 266 - DNA, 21 bp, Artificial Sequence
  n-mer motif encoding polynucleotide
gctaatgagcataatgtgggt

SEQ ID NO: 267 - DNA, 21 bp, Artificial Sequence
  n-mer motif encoding polynucleotide
atgcaaagagaagcagccaac

SEQ ID NO: 268 - DNA, 21 bp, Artificial Sequence
  n-mer motif encoding polynucleotide
ttaaccgacacaaacacccgg

SEQ ID NO: 269 - DNA, 21 bp, Artificial Sequence
  n-mer motif encoding polynucleotide
cgaatgaccgaaatatcatac

SEQ ID NO: 270 - DNA, 21 bp, Artificial Sequence
  n-mer motif encoding polynucleotide
aaagtggacatgacctccaaa

SEQ ID NO: 271 - DNA, 21 bp, Artificial Sequence
  n-mer motif encoding polynucleotide
agaggagacttatccacaccc

SEQ ID NO: 272 - DNA, 21 bp, Artificial Sequence
  n-mer motif encoding polynucleotide
caagcaaaagctagcacaact

SEQ ID NO: 273 - DNA, 21 bp, Artificial Sequence
  n-mer motif encoding polynucleotide
ctaccctcaacagaaactttg

SEQ ID NO: 274 - DNA, 21 bp, Artificial Sequence
  n-mer motif encoding polynucleotide
agtagtgcgcttaatgcgtat

SEQ ID NO: 275 - DNA, 21 bp, Artificial Sequence
  n-mer motif encoding polynucleotide
tcgtctgatcctaaggggcag

SEQ ID NO: 276 - DNA, 21 bp, Artificial Sequence
  n-mer motif encoding polynucleotide
ttagacgtgacgagaatgaga

SEQ ID NO: 277 - DNA, 21 bp, Artificial Sequence
  n-mer motif encoding polynucleotide
gcggatggtggtgataagggg

SEQ ID NO: 278 - DNA, 21 bp, Artificial Sequence
  n-mer motif encoding polynucleotide
atgctgtctcaggttacgttg

SEQ ID NO: 279 - DNA, 21 bp, Artificial Sequence
  n-mer motif encoding polynucleotide
agtgttagttctgtggtgttg

SEQ ID NO: 280 - DNA, 21 bp, Artificial Sequence
  n-mer motif encoding polynucleotide
accgaatcgcaaaccatgagg

SEQ ID NO: 281 - DNA, 21 bp, Artificial Sequence
  n-mer motif encoding polynucleotide
ttcggatcccaagaaaaactc

SEQ ID NO: 282 - DNA, 21 bp, Artificial Sequence
  n-mer motif encoding polynucleotide
acagccggcggcgaacgcgcc

SEQ ID NO: 283 - DNA, 21 bp, Artificial Sequence
  n-mer motif encoding polynucleotide
gatcatagtaagcagagttcg

SEQ ID NO: 284 - DNA, 21 bp, Artificial Sequence
  n-mer motif encoding polynucleotide
attgatagtacttggaatacg

SEQ ID NO: 285 - DNA, 21 bp, Artificial Sequence
  n-mer motif encoding polynucleotide
tcgcctcgccccgaactccga

SEQ ID NO: 286 - DNA, 21 bp, Artificial Sequence
  n-mer motif encoding polynucleotide
agtattgcgactgctactagt

SEQ ID NO: 287 - DNA, 21 bp, Artificial Sequence
  n-mer motif encoding polynucleotide
gtaataggcggacacgggact

SEQ ID NO: 288 - DNA, 21 bp, Artificial Sequence
  n-mer motif encoding polynucleotide
agcaccgccatgtacccccac

SEQ ID NO: 289 - DNA, 21 bp, Artificial Sequence
  n-mer motif encoding polynucleotide
cgggacttgagacccgtgacg

SEQ ID NO: 290 - DNA, 21 bp, Artificial Sequence
  n-mer motif encoding polynucleotide
gctcatctgactgatcttccg

SEQ ID NO: 291 - DNA, 21 bp, Artificial Sequence
  n-mer motif encoding polynucleotide
tttctgaatagtacgcagctt

SEQ ID NO: 292 - DNA, 21 bp, Artificial Sequence
  n-mer motif encoding polynucleotide
ttaaacaacagtgccacagtc

SEQ ID NO: 293 - DNA, 21 bp, Artificial Sequence
  n-mer motif encoding polynucleotide
gatcgtccgaataatatgacg

SEQ ID NO: 294 - DNA, 21 bp, Artificial Sequence
  n-mer motif encoding polynucleotide
tcatcgtcagactcacccaga

SEQ ID NO: 295 - DNA, 21 bp, Artificial Sequence
  n-mer motif encoding polynucleotide
cgcttggacgttggaagcccg

SEQ ID NO: 296 - DNA, 21 bp, Artificial Sequence
  n-mer motif encoding polynucleotide
gcgcagcagagtcttcatggt

SEQ ID NO: 297 - DNA, 21 bp, Artificial Sequence
  n-mer motif encoding polynucleotide
atggggaagcatgagggtctt

SEQ ID NO: 298 - DNA, 21 bp, Artificial Sequence
  n-mer motif encoding polynucleotide
gagaatgctcgtgagggtgtg

SEQ ID NO: 299 - DNA, 21 bp, Artificial Sequence
  n-mer motif encoding polynucleotide
accgtatctctctcggaaggc

SEQ ID NO: 300 - DNA, 21 bp, Artificial Sequence
  n-mer motif encoding polynucleotide
cttaacacactaatcgaccgg

SEQ ID NO: 301 - DNA, 21 bp, Artificial Sequence
  n-mer motif encoding polynucleotide
gaactctccgttccgaaacca

SEQ ID NO: 302 - DNA, 21 bp, Artificial Sequence
  n-mer motif encoding polynucleotide
aaagacaaaaacgtatacata

SEQ ID NO: 303 - DNA, 21 bp, Artificial Sequence
  n-mer motif encoding polynucleotide
aatgcgaatgggcctgtgagt

SEQ ID NO: 304 - DNA, 21 bp, Artificial Sequence
  n-mer motif encoding polynucleotide
cttactacgaatggtatgctg

SEQ ID NO: 305 - DNA, 21 bp, Artificial Sequence
  n-mer motif encoding polynucleotide
gccggcgaatcttcacccaca

SEQ ID NO: 306 - DNA, 21 bp, Artificial Sequence
  n-mer motif encoding polynucleotide
agtgggattggtacttattct

SEQ ID NO: 307 - DNA, 21 bp, Artificial Sequence
  n-mer motif encoding polynucleotide
gtcagatctatggacgaattg

SEQ ID NO: 308 - DNA, 21 bp, Artificial Sequence
  n-mer motif encoding polynucleotide
atgaacaccggctcttcgagt

SEQ ID NO: 309 - DNA, 21 bp, Artificial Sequence
  n-mer motif encoding polynucleotide
ggggtgactgttagggagctt

SEQ ID NO: 310 - DNA, 21 bp, Artificial Sequence
  n-mer motif encoding polynucleotide
cagattttgaattatagtgtg

SEQ ID NO: 311 - DNA, 21 bp, Artificial Sequence
  n-mer motif encoding polynucleotide
atggcgggtgagtatagggtt

SEQ ID NO: 312 - DNA, 21 bp, Artificial Sequence
  n-mer motif encoding polynucleotide
tggtcgcatgatcggcctact

SEQ ID NO: 313 - DNA, 21 bp, Artificial Sequence
  n-mer motif encoding polynucleotide
tgcaaaaacaactcagaatgc

SEQ ID NO: 314 - DNA, 21 bp, Artificial Sequence
  n-mer motif encoding polynucleotide
ttgacgacgaatagtcattat

SEQ ID NO: 315 - DNA, 21 bp, Artificial Sequence
  n-mer motif encoding polynucleotide
atgcttgttcagaatactcct

SEQ ID NO: 316 - DNA, 21 bp, Artificial Sequence
  n-mer motif encoding polynucleotide
cgtggtgcgactgagcatgcg

SEQ ID NO: 317 - DNA, 21 bp, Artificial Sequence
  n-mer motif encoding polynucleotide
gcttcgaatgggagtatgggt

SEQ ID NO: 318 - DNA, 21 bp, Artificial Sequence
  n-mer motif encoding polynucleotide
aatagttatactgctgggaag

SEQ ID NO: 319 - DNA, 21 bp, Artificial Sequence
  n-mer motif encoding polynucleotide
tccacccaaggagccatcctc

SEQ ID NO: 320 - DNA, 21 bp, Artificial Sequence
  n-mer motif encoding polynucleotide
tggaatacgaatatggcgatt

SEQ ID NO: 321 - DNA, 21 bp, Artificial Sequence
  n-mer motif encoding polynucleotide
gtctcatcgtacgaaaaaata

SEQ ID NO: 322 - DNA, 21 bp, Artificial Sequence
  n-mer motif encoding polynucleotide
gtgctgagtacggggcagcgg

SEQ ID NO: 323 - DNA, 21 bp, Artificial Sequence
  n-mer motif encoding polynucleotide
cctataccccacggttcatcc

SEQ ID NO: 324 - DNA, 21 bp, Artificial Sequence
  n-mer motif encoding polynucleotide
aacgtgtcactaacgcaaacg

SEQ ID NO: 325 - DNA, 21 bp, Artificial Sequence
  n-mer motif encoding polynucleotide
tctaccatcggcaacagcacg

SEQ ID NO: 326 - DNA, 21 bp, Artificial Sequence
  n-mer motif encoding polynucleotide
tctgagaagctgactgataag

SEQ ID NO: 327 - DNA, 21 bp, Artificial Sequence
  n-mer motif encoding polynucleotide
tccaaagactcgaacataagt

SEQ ID NO: 328 - DNA, 21 bp, Artificial Sequence
  n-mer motif encoding polynucleotide
gcgaatagtaatcatgagcgt

SEQ ID NO: 329 - DNA, 21 bp, Artificial Sequence
  n-mer motif encoding polynucleotide
agggatacgggtgataaggct

SEQ ID NO: 330 - DNA, 21 bp, Artificial Sequence
  n-mer motif encoding polynucleotide
agaacagacacgccgtcaacc

SEQ ID NO: 331 - DNA, 21 bp, Artificial Sequence
  n-mer motif encoding polynucleotide
cctactatgtcgagtctgaat

SEQ ID NO: 332 - DNA, 21 bp, Artificial Sequence
  n-mer motif encoding polynucleotide
gatattactaatcagtcgtat

SEQ ID NO: 333 - DNA, 21 bp, Artificial Sequence
  n-mer motif encoding polynucleotide
cttgtaaaaccggaaacttgg

SEQ ID NO: 334 - DNA, 21 bp, Artificial Sequence
  n-mer motif encoding polynucleotide
gggacttccttggaaaaccga

SEQ ID NO: 335 - DNA, 21 bp, Artificial Sequence
  n-mer motif encoding polynucleotide
gctgctggtaatcctactcgt

SEQ ID NO: 336 - DNA, 21 bp, Artificial Sequence
  n-mer motif encoding polynucleotide
cacaacgtcggcctaggacac

SEQ ID NO: 337 - DNA, 21 bp, Artificial Sequence
  n-mer motif encoding polynucleotide
gtatcaacgacaacggaccgg

SEQ ID NO: 338 - DNA, 21 bp, Artificial Sequence
  n-mer motif encoding polynucleotide
tatttgtcgtctggtaagatg

SEQ ID NO: 339 - DNA, 21 bp, Artificial Sequence
  n-mer motif encoding polynucleotide
gatagtcggaatgctgctttg

SEQ ID NO: 340 - DNA, 21 bp, Artificial Sequence
  n-mer motif encoding polynucleotide
gtggagcggaatactgatatg

SEQ ID NO: 341 - DNA, 21 bp, Artificial Sequence
  n-mer motif encoding polynucleotide
actgttgggagtaattctatt

SEQ ID NO: 342 - DNA, 21 bp, Artificial Sequence
  n-mer motif encoding polynucleotide
gtgcggtctggtaataagccg

SEQ ID NO: 343 - DNA, 21 bp, Artificial Sequence
  n-mer motif encoding polynucleotide
ggcagttcggggaacagcgga

SEQ ID NO: 344 - DNA, 21 bp, Artificial Sequence
  n-mer motif encoding polynucleotide
tctacttcaataggagtggta

SEQ ID NO: 345 - DNA, 21 bp, Artificial Sequence
  n-mer motif encoding polynucleotide
ccgagtcagagtaggtcgctt

SEQ ID NO: 346 - DNA, 21 bp, Artificial Sequence
  n-mer motif encoding polynucleotide
cggaatgagaatcttaataat

SEQ ID NO: 347 - DNA, 21 bp, Artificial Sequence
  n-mer motif encoding polynucleotide
tcgttgggtaagagggaggag

SEQ ID NO: 348 - DNA, 21 bp, Artificial Sequence
  n-mer motif encoding polynucleotide
tcacgcttggactcgagctcc

SEQ ID NO: 349 - DNA, 21 bp, Artificial Sequence
  n-mer motif encoding polynucleotide
gattcgacgtatgttttggct

SEQ ID NO: 350 - DNA, 21 bp, Artificial Sequence
  n-mer motif encoding polynucleotide
gagcgtaatcctatttctgat

SEQ ID NO: 351 - DNA, 21 bp, Artificial Sequence
  n-mer motif encoding polynucleotide
gttagctccggccacacgaaa

SEQ ID NO: 352 - DNA, 21 bp, Artificial Sequence
  n-mer motif encoding polynucleotide
aagtatacggagtcgaatgcg

SEQ ID NO: 353 - DNA, 21 bp, Artificial Sequence
  n-mer motif encoding polynucleotide
aaccgcaactcagttgggact

SEQ ID NO: 354 - DNA, 21 bp, Artificial Sequence
  n-mer motif encoding polynucleotide
cacgaaagccactacgtgtca

SEQ ID NO: 355 - DNA, 21 bp, Artificial Sequence
  n-mer motif encoding polynucleotide
acgactggggggacggggatg

SEQ ID NO: 356 - DNA, 21 bp, Artificial Sequence
  n-mer motif encoding polynucleotide
gcgactgataagatgactcct

SEQ ID NO: 357 - DNA, 21 bp, Artificial Sequence
  n-mer motif encoding polynucleotide
tccgcgtctagcggcgctaca

SEQ ID NO: 358 - DNA, 21 bp, Artificial Sequence
  n-mer motif encoding polynucleotide
tcaaccactactggccacatg

SEQ ID NO: 359 - DNA, 21 bp, Artificial Sequence
  n-mer motif encoding polynucleotide
ataatagcatcctctaccacg

SEQ ID NO: 360 - DNA, 21 bp, Artificial Sequence
  n-mer motif encoding polynucleotide
gatactgggtctaggattgcg

SEQ ID NO: 361 - DNA, 21 bp, Artificial Sequence
  n-mer motif encoding polynucleotide
tgggctgatgattcgcagcgg

SEQ ID NO: 362 - DNA, 21 bp, Artificial Sequence
  n-mer motif encoding polynucleotide
aggggtaacactctcgaaatg

SEQ ID NO: 363 - DNA, 21 bp, Artificial Sequence
  n-mer motif encoding polynucleotide
aatctgcaggtgaatgcgaat

SEQ ID NO: 364 - DNA, 21 bp, Artificial Sequence
  n-mer motif encoding polynucleotide
gcgacgactcagctgatgact

SEQ ID NO: 365 - DNA, 21 bp, Artificial Sequence
  n-mer motif encoding polynucleotide
gctgatacgaatattattgtg

SEQ ID NO: 366 - DNA, 21 bp, Artificial Sequence
  n-mer motif encoding polynucleotide
gccataacaatcactcaaaaa

SEQ ID NO: 367 - DNA, 21 bp, Artificial Sequence
  n-mer motif encoding polynucleotide
gactccaacaaaggagcgacg

SEQ ID NO: 368 - DNA, 21 bp, Artificial Sequence
  n-mer motif encoding polynucleotide
ggcaacgcttccggaaaccca

SEQ ID NO: 369 - DNA, 21 bp, Artificial Sequence
  n-mer motif encoding polynucleotide
acgatgggtgctaaaggtact

SEQ ID NO: 370 - DNA, 21 bp, Artificial Sequence
  n-mer motif encoding polynucleotide
tatctgcagacgggtactctg

SEQ ID NO: 371 - DNA, 21 bp, Artificial Sequence
  n-mer motif encoding polynucleotide
gcattacacaccaaagaccta

SEQ ID NO: 372 - DNA, 21 bp, Artificial Sequence
  n-mer motif encoding polynucleotide
gtcgacaaaagcgaagccgtc

SEQ ID NO: 373 - DNA, 21 bp, Artificial Sequence
  n-mer motif encoding polynucleotide
gggaggacggatcttatggcg

SEQ ID NO: 374 - DNA, 21 bp, Artificial Sequence
  n-mer motif encoding polynucleotide
ggcacggaaccgcgcactgca

SEQ ID NO: 375 - DNA, 21 bp, Artificial Sequence
  n-mer motif encoding polynucleotide
agaggcgacatgtcacgagaa

SEQ ID NO: 376 - DNA, 21 bp, Artificial Sequence
  n-mer motif encoding polynucleotide
cggggggatactaagtctaag

SEQ ID NO: 377 - DNA, 21 bp, Artificial Sequence
  n-mer motif encoding polynucleotide
gggacattagcctcaatgtcc

SEQ ID NO: 378 - DNA, 21 bp, Artificial Sequence
  n-mer motif encoding polynucleotide
cagaagtctgtgacgtattcg

SEQ ID NO: 379 - DNA, 21 bp, Artificial Sequence
  n-mer motif encoding polynucleotide
agtacggggcagactcttgtt

SEQ ID NO: 380 - DNA, 21 bp, Artificial Sequence
  n-mer motif encoding polynucleotide
tcgcacataaacatggggtcg

SEQ ID NO: 381 - DNA, 21 bp, Artificial Sequence
  n-mer motif encoding polynucleotide
gcgttgaatggtactggtaat

SEQ ID NO: 382 - DNA, 21 bp, Artificial Sequence
  n-mer motif encoding polynucleotide
actacgagttcgaatcagcat

SEQ ID NO: 383 - DNA, 21 bp, Artificial Sequence
  n-mer motif encoding polynucleotide
aaaaactacgcaagcaccgac

SEQ ID NO: 384 - DNA, 21 bp, Artificial Sequence
  n-mer motif encoding polynucleotide
gaatccacaagcaggacgtac

SEQ ID NO: 385 - DNA, 21 bp, Artificial Sequence
  n-mer motif encoding polynucleotide
ccgcgttctattacggagttg

SEQ ID NO: 386 - DNA, 21 bp, Artificial Sequence
  n-mer motif encoding polynucleotide
tacatagccggaggagaaaaa

SEQ ID NO: 387 - DNA, 21 bp, Artificial Sequence
  n-mer motif encoding polynucleotide
actagtaattatatgcatgag

SEQ ID NO: 388 - DNA, 21 bp, Artificial Sequence
  n-mer motif encoding polynucleotide
ttggatcctaatagtactcgg

SEQ ID NO: 389 - DNA, 21 bp, Artificial Sequence
  n-mer motif encoding polynucleotide
cacagtgacatgggctcaagc

SEQ ID NO: 390 - DNA, 21 bp, Artificial Sequence
  n-mer motif encoding polynucleotide
gacaccgccaaccgatccaca

SEQ ID NO: 391 - DNA, 21 bp, Artificial Sequence
  n-mer motif encoding polynucleotide
aacgccggacacagcggtcaa

SEQ ID NO: 392 - DNA, 21 bp, Artificial Sequence
  n-mer motif encoding polynucleotide
agtttggggtcggatcgtatg

SEQ ID NO: 393 - DNA, 21 bp, Artificial Sequence
  n-mer motif encoding polynucleotide
gacaaccaacaagccctagct

SEQ ID NO: 394 - DNA, 21 bp, Artificial Sequence
  n-mer motif encoding polynucleotide
ccatcctcagcgggtagcaca

SEQ ID NO: 395 - DNA, 21 bp, Artificial Sequence
  n-mer motif encoding polynucleotide
gacaggaaagggtacgacgca

SEQ ID NO: 396 - DNA, 21 bp, Artificial Sequence
  n-mer motif encoding polynucleotide
ggaggaaaccaaaaccttact

SEQ ID NO: 397 - DNA, 21 bp, Artificial Sequence
  n-mer motif encoding polynucleotide
gtgaatctgaatgagacggag

SEQ ID NO: 398 - DNA, 21 bp, Artificial Sequence
  n-mer motif encoding polynucleotide
tcccccggcaacgggttgcta

SEQ ID NO: 399 - DNA, 21 bp, Artificial Sequence
  n-mer motif encoding polynucleotide
tctgtcggggacctcacaaaa

SEQ ID NO: 400 - DNA, 21 bp, Artificial Sequence
  n-mer motif encoding polynucleotide
cgatacgaatccgtcggactc

SEQ ID NO: 401 - DNA, 21 bp, Artificial Sequence
  n-mer motif encoding polynucleotide
acgagagaattgacaaaaaac

SEQ ID NO: 402 - DNA, 21 bp, Artificial Sequence
  n-mer motif encoding polynucleotide
actccaactaacgggaaccct

SEQ ID NO: 403 - DNA, 21 bp, Artificial Sequence
  n-mer motif encoding polynucleotide
gcgactgatcagcgttcgagg

SEQ ID NO: 404 - DNA, 21 bp, Artificial Sequence
  n-mer motif encoding polynucleotide
ggaacatcggcagaatcacgc

SEQ ID NO: 405 - DNA, 21 bp, Artificial Sequence
  n-mer motif encoding polynucleotide
aggatgctctctactttgcct

SEQ ID NO: 406 - DNA, 21 bp, Artificial Sequence
  n-mer motif encoding polynucleotide
ggtatcaactcctcacacttc

SEQ ID NO: 407 - DNA, 21 bp, Artificial Sequence
  n-mer motif encoding polynucleotide
agtagctcaactgaagggcaa

SEQ ID NO: 408 - DNA, 21 bp, Artificial Sequence
  n-mer motif encoding polynucleotide
gacaaacaacaaaccggacaa

SEQ ID NO: 409 - DNA, 21 bp, Artificial Sequence
  n-mer motif encoding polynucleotide
acccaacacctaccatccaca

SEQ ID NO: 410 - DNA, 21 bp, Artificial Sequence
  n-mer motif encoding polynucleotide
ggtctggggcagcctcagttg

SEQ ID NO: 411 - DNA, 21 bp, Artificial Sequence
  n-mer motif encoding polynucleotide
gtgactaatgagagtcgtgct

SEQ ID NO: 412 - DNA, 21 bp, Artificial Sequence
  n-mer motif encoding polynucleotide
ggcaactcgaactaccgagaa

SEQ ID NO: 413 - DNA, 21 bp, Artificial Sequence
  n-mer motif encoding polynucleotide
tggaatgctgagaatagtaag

SEQ ID NO: 414 - DNA, 21 bp, Artificial Sequence
  n-mer motif encoding polynucleotide
cctgggagtcagcgtcaggat

SEQ ID NO: 415 - DNA, 21 bp, Artificial Sequence
  n-mer motif encoding polynucleotide
catacgtattcgcaggctgat

SEQ ID NO: 416 - DNA, 21 bp, Artificial Sequence
  n-mer motif encoding polynucleotide
actgccggcaacctaagaagt

SEQ ID NO: 417 - DNA, 21 bp, Artificial Sequence
  n-mer motif encoding polynucleotide
ggcagacaccttcaatcggac

SEQ ID NO: 418 - DNA, 21 bp, Artificial Sequence
  n-mer motif encoding polynucleotide
aacaacgcacacaccgccact

SEQ ID NO: 419 - DNA, 21 bp, Artificial Sequence
  n-mer motif encoding polynucleotide
agtacgagtcaggagaatagg

SEQ ID NO: 420 - DNA, 21 bp, Artificial Sequence
  n-mer motif encoding polynucleotide
aggggtgatactatgaattat

SEQ ID NO: 421 - DNA, 21 bp, Artificial Sequence
  n-mer motif encoding polynucleotide
ccggttgctactcagcatgcg

SEQ ID NO: 422 - DNA, 21 bp, Artificial Sequence
  n-mer motif encoding polynucleotide
gggcatttgaatgctccgact

SEQ ID NO: 423 - DNA, 21 bp, Artificial Sequence
  n-mer motif encoding polynucleotide
caaatattaaactactcagtc

SEQ ID NO: 424 - DNA, 21 bp, Artificial Sequence
  n-mer motif encoding polynucleotide
caaaaccacgcgtctggtgaa

SEQ ID NO: 425 - DNA, 21 bp, Artificial Sequence
  n-mer motif encoding polynucleotide
ggtttaacagggcgggaacta

SEQ ID NO: 426 - DNA, 21 bp, Artificial Sequence
  n-mer motif encoding polynucleotide
gacgtagccgtgactcaacac

SEQ ID NO: 427 - DNA, 21 bp, Artificial Sequence
  n-mer motif encoding polynucleotide
gcaacttacaccgggcgaaca

SEQ ID NO: 428 - DNA, 21 bp, Artificial Sequence
  n-mer motif encoding polynucleotide
aaagaactacaatggcaacga

SEQ ID NO: 429 - DNA, 21 bp, Artificial Sequence
  n-mer motif encoding polynucleotide
gctagttatagtagtatggtg

SEQ ID NO: 430 - DNA, 21 bp, Artificial Sequence
  n-mer motif encoding polynucleotide
gttattagtcatggggcgctg

SEQ ID NO: 431 - DNA, 21 bp, Artificial Sequence
  n-mer motif encoding polynucleotide
cctatacaccacggttcatcc

SEQ ID NO: 432 - DNA, 21 bp, Artificial Sequence
  n-mer motif encoding polynucleotide
gtggataagaatcatcctttg

SEQ ID NO: 433 - DNA, 21 bp, Artificial Sequence
  n-mer motif encoding polynucleotide
acctcgggtgaccggtacacg

SEQ ID NO: 434 - DNA, 21 bp, Artificial Sequence
  n-mer motif encoding polynucleotide
gggacaaaaagctggcctgtc

SEQ ID NO: 435 - DNA, 21 bp, Artificial Sequence
  n-mer motif encoding polynucleotide
tacaacgcccacgaatcattc

SEQ ID NO: 436 - DNA, 21 bp, Artificial Sequence
  n-mer motif encoding polynucleotide
agagtccacgacactccttca

SEQ ID NO: 437 - DNA, 21 bp, Artificial Sequence
  n-mer motif encoding polynucleotide
gcacaaatcgaatcaggccga

SEQ ID NO: 438 - DNA, 21 bp, Artificial Sequence
  n-mer motif encoding polynucleotide
tggaaggataatatgcggatg

SEQ ID NO: 439 - DNA, 21 bp, Artificial Sequence
  n-mer motif encoding polynucleotide
atgcctagtgaaccaccaggg

SEQ ID NO: 440 - DNA, 21 bp, Artificial Sequence
  n-mer motif encoding polynucleotide
cgtggtgattatccgacgtcg

SEQ ID NO: 441 - DNA, 21 bp, Artificial Sequence
  n-mer motif encoding polynucleotide
tttcataatgagtcttatggg

SEQ ID NO: 442 - DNA, 21 bp, Artificial Sequence
  n-mer motif encoding polynucleotide
ttgaatacgatgattgataag

SEQ ID NO: 443 - DNA, 21 bp, Artificial Sequence
  n-mer motif encoding polynucleotide
tccacactaagccaaggagca

SEQ ID NO: 444 - DNA, 21 bp, Artificial Sequence
  n-mer motif encoding polynucleotide
cctttgcacaacatacctcct

SEQ ID NO: 445 - DNA, 21 bp, Artificial Sequence
  n-mer motif encoding polynucleotide
gcttcgtctacgtttttgcct

SEQ ID NO: 446 - DNA, 21 bp, Artificial Sequence
  n-mer motif encoding polynucleotide
atggaaggaatgggactcgga

SEQ ID NO: 447 - DNA, 21 bp, Artificial Sequence
  n-mer motif encoding polynucleotide
aaggattataagccgtatgct

SEQ ID NO: 448 - DNA, 21 bp, Artificial Sequence
  n-mer motif encoding polynucleotide
aatttgcagtctggtgttcag

SEQ ID NO: 449 - DNA, 21 bp, Artificial Sequence
  n-mer motif encoding polynucleotide
acaactcttagccaacaaagc

SEQ ID NO: 450 - DNA, 21 bp, Artificial Sequence
  n-mer motif encoding polynucleotide
cttatgtcgtctacttcctca

SEQ ID NO: 451 - DNA, 21 bp, Artificial Sequence
  n-mer motif encoding polynucleotide
actggccaaggattctcggca

SEQ ID NO: 452 - DNA, 21 bp, Artificial Sequence
  n-mer motif encoding polynucleotide
tctacaatcggcaacagcacg

SEQ ID NO: 453 - DNA, 21 bp, Artificial Sequence
  n-mer motif encoding polynucleotide
ctgagggcgagtgaggctccg

SEQ ID NO: 454 - DNA, 21 bp, Artificial Sequence
  n-mer motif encoding polynucleotide
cagcctaataatggtaatcat

SEQ ID NO: 455 - DNA, 21 bp, Artificial Sequence
  n-mer motif encoding polynucleotide
tcgtcagacgttaccagacaa

SEQ ID NO: 456 - DNA, 21 bp, Artificial Sequence
  n-mer motif encoding polynucleotide
cggggtgacgcaacagaaatg

SEQ ID NO: 457 - DNA, 21 bp, Artificial Sequence
  n-mer motif encoding polynucleotide
tataggggtagggaggattgg

SEQ ID NO: 458 - DNA, 21 bp, Artificial Sequence
  n-mer motif encoding polynucleotide
agcttgcaacaatcacaattg

SEQ ID NO: 459 - DNA, 21 bp, Artificial Sequence
  n-mer motif encoding polynucleotide
aagccgactgcgaatgattgg

SEQ ID NO: 460 - DNA, 21 bp, Artificial Sequence
  n-mer motif encoding polynucleotide
cgtctgactgatactatgcat

SEQ ID NO: 461 - DNA, 21 bp, Artificial Sequence
  n-mer motif encoding polynucleotide
cttcatgggaattatagtccg

SEQ ID NO: 462 - DNA, 21 bp, Artificial Sequence
  n-mer motif encoding polynucleotide
attccggttggggcgatggct

SEQ ID NO: 463 - DNA, 21 bp, Artificial Sequence
  n-mer motif encoding polynucleotide
ccgaacaccgcctcaaacttc

SEQ ID NO: 464 - DNA, 21 bp, Artificial Sequence
  n-mer motif encoding polynucleotide
acgagtagagaagtcaaaggg

SEQ ID NO: 465 - DNA, 21 bp, Artificial Sequence
  n-mer motif encoding polynucleotide
gacacgtcctccggcaacagg

SEQ ID NO: 466 - DNA, 21 bp, Artificial Sequence
  n-mer motif encoding polynucleotide
gaagcagtaacaagtaaatgg

SEQ ID NO: 467 - DNA, 21 bp, Artificial Sequence
  n-mer motif encoding polynucleotide
ctaatcacagccaccactaac

SEQ ID NO: 468 - DNA, 21 bp, Artificial Sequence
  n-mer motif encoding polynucleotide
gatgggggtcgttcgggtatt

SEQ ID NO: 469 - DNA, 21 bp, Artificial Sequence
  n-mer motif encoding polynucleotide
ttcatggaagtcatgaaaaac

SEQ ID NO: 470 - DNA, 21 bp, Artificial Sequence
  n-mer motif encoding polynucleotide
tcctaccaaaacccaccacca

SEQ ID NO: 471 - DNA, 21 bp, Artificial Sequence
  n-mer motif encoding polynucleotide
actaatgtgacgtttaagctt

SEQ ID NO: 472 - DNA, 21 bp, Artificial Sequence
  n-mer motif encoding polynucleotide
atttctacgcatacgatgacg

SEQ ID NO: 473 - DNA, 21 bp, Artificial Sequence
  n-mer motif encoding polynucleotide
gaaacccaaggagcaagatac

SEQ ID NO: 474 - DNA, 21 bp, Artificial Sequence
  n-mer motif encoding polynucleotide
gcggcttatgagcatgcgcct

SEQ ID NO: 475 - DNA, 21 bp, Artificial Sequence
  n-mer motif encoding polynucleotide
tcaacgaacgaccgtgcgtta

SEQ ID NO: 476 - DNA, 21 bp, Artificial Sequence
  n-mer motif encoding polynucleotide
ttcaccgaacgcgcactccaa

SEQ ID NO: 477 - DNA, 21 bp, Artificial Sequence
  n-mer motif encoding polynucleotide
gtagcgggcttagtcgacata

SEQ ID NO: 478 - DNA, 21 bp, Artificial Sequence
  n-mer motif encoding polynucleotide
agctcggtaactaaccttgca

SEQ ID NO: 479 - DNA, 21 bp, Artificial Sequence
  n-mer motif encoding polynucleotide
gatactactactggtcatctt

SEQ ID NO: 480 - DNA, 21 bp, Artificial Sequence
  n-mer motif encoding polynucleotide
acgcgtaatttgtctgagagt

SEQ ID NO: 481 - DNA, 21 bp, Artificial Sequence
  n-mer motif encoding polynucleotide
caggtgaatgttgggcctggt

SEQ ID NO: 482 - DNA, 21 bp, Artificial Sequence
  n-mer motif encoding polynucleotide
aaacaaacgatgtccgacaca

SEQ ID NO: 483 - DNA, 21 bp, Artificial Sequence
  n-mer motif encoding polynucleotide
atgtcgacaaccagcaaaact

SEQ ID NO: 484 - DNA, 21 bp, Artificial Sequence
  n-mer motif encoding polynucleotide
actacaatagggacaaaccaa

SEQ ID NO: 485 - DNA, 21 bp, Artificial Sequence
  n-mer motif encoding polynucleotide
gggactctgacgccgaatctt

SEQ ID NO: 486 - DNA, 21 bp, Artificial Sequence
  n-mer motif encoding polynucleotide
tttgatagttataatattgtg

SEQ ID NO: 487 - DNA, 21 bp, Artificial Sequence
  n-mer motif encoding polynucleotide
cgtggtgcgcctgagcaagcg

SEQ ID NO: 488 - DNA, 21 bp, Artificial Sequence
  n-mer motif encoding polynucleotide
atcgaaaacgtaaaccacttg

SEQ ID NO: 489 - DNA, 21 bp, Artificial Sequence
  n-mer motif encoding polynucleotide
aggtctctggagagtcaggct

SEQ ID NO: 490 - DNA, 21 bp, Artificial Sequence
  n-mer motif encoding polynucleotide
cagtatacgagtctgagtccg

SEQ ID NO: 491 - DNA, 21 bp, Artificial Sequence
  n-mer motif encoding polynucleotide
acgaagggttataatgatctt

SEQ ID NO: 492 - DNA, 21 bp, Artificial Sequence
  n-mer motif encoding polynucleotide
gtcgcctcgatggtacacaac

SEQ ID NO: 493 - DNA, 21 bp, Artificial Sequence
  n-mer motif encoding polynucleotide
tccacaacccacacctcagca

SEQ ID NO: 494 - DNA, 21 bp, Artificial Sequence
  n-mer motif encoding polynucleotide
cttgcgcacccacaaccaaac

SEQ ID NO: 495 - DNA, 21 bp, Artificial Sequence
  n-mer motif encoding polynucleotide
tcgataaacaacataggcgca

SEQ ID NO: 496 - DNA, 21 bp, Artificial Sequence
  n-mer motif encoding polynucleotide
gctatagactccatcaaaatg

SEQ ID NO: 497 - DNA, 21 bp, Artificial Sequence
  n-mer motif encoding polynucleotide
tctatgtatgggcaggctggg

SEQ ID NO: 498 - DNA, 21 bp, Artificial Sequence
  n-mer motif encoding polynucleotide
gagtatgctaatgctaagact

SEQ ID NO: 499 - DNA, 21 bp, Artificial Sequence
  n-mer motif encoding polynucleotide
tatcgggcttcggatgtggcg

SEQ ID NO: 500 - DNA, 21 bp, Artificial Sequence
  n-mer motif encoding polynucleotide
gttagtttggagagtcggttg

SEQ ID NO: 501 - DNA, 21 bp, Artificial Sequence
  n-mer motif encoding polynucleotide
attgagactagttcgcgttcg

SEQ ID NO: 502 - DNA, 21 bp, Artificial Sequence
  n-mer motif encoding polynucleotide
atgggagtgaaacccgaacaa

SEQ ID NO: 503 - DNA, 21 bp, Artificial Sequence
  n-mer motif encoding polynucleotide
gcgcttccgtctcgtgagcgg

SEQ ID NO: 504 - DNA, 21 bp, Artificial Sequence
  n-mer motif encoding polynucleotide
ggcaccggatcttcagcgcac

SEQ ID NO: 505 - DNA, 21 bp, Artificial Sequence
  n-mer motif encoding polynucleotide
caaacgaacaccaacgacaga

SEQ ID NO: 506 - DNA, 21 bp, Artificial Sequence
  n-mer motif encoding polynucleotide
gtattacactctgtatcagca

SEQ ID NO: 507 - DNA, 21 bp, Artificial Sequence
  n-mer motif encoding polynucleotide
ccttattctgctactgatcgg

SEQ ID NO: 508 - DNA, 21 bp, Artificial Sequence
  n-mer motif encoding polynucleotide
gcaaactccggattacacaac

SEQ ID NO: 509 - DNA, 21 bp, Artificial Sequence
  n-mer motif encoding polynucleotide
tatgagagtactcatgttaat

SEQ ID NO: 510 - DNA, 21 bp, Artificial Sequence
  n-mer motif encoding polynucleotide
aacaacgcactagtaggaagt

SEQ ID NO: 511 - DNA, 21 bp, Artificial Sequence
  n-mer motif encoding polynucleotide
ggtatcaactcctcacacatc

SEQ ID NO: 512 - DNA, 21 bp, Artificial Sequence
  n-mer motif encoding polynucleotide
agtatttctgataagaatcag

SEQ ID NO: 513 - DNA, 21 bp, Artificial Sequence
  n-mer motif encoding polynucleotide
gaccaccaacaagccctagca

SEQ ID NO: 514 - DNA, 21 bp, Artificial Sequence
  n-mer motif encoding polynucleotide
gactctaccaaagccatgcaa

SEQ ID NO: 515 - DNA, 21 bp, Artificial Sequence
  n-mer motif encoding polynucleotide
actattactagtcagtcggtg

SEQ ID NO: 516 - DNA, 21 bp, Artificial Sequence
  n-mer motif encoding polynucleotide
ggcgcccgtacaatcttagac

SEQ ID NO: 517 - DNA, 21 bp, Artificial Sequence
  n-mer motif encoding polynucleotide
gagcatagtcctacgactggt

SEQ ID NO: 518 - DNA, 21 bp, Artificial Sequence
  n-mer motif encoding polynucleotide
gggctcacaggatacccaatg

SEQ ID NO: 519 - DNA, 21 bp, Artificial Sequence
  n-mer motif encoding polynucleotide
acgatggaatccggccgccac

SEQ ID NO: 520 - DNA, 21 bp, Artificial Sequence
  n-mer motif encoding polynucleotide
tctgcgtcgaaagtggaatac

SEQ ID NO: 521 - DNA, 21 bp, Artificial Sequence
  n-mer motif encoding polynucleotide
gataagtctaattatagtatt

SEQ ID NO: 522 - DNA, 21 bp, Artificial Sequence
  n-mer motif encoding polynucleotide
ttcaacgaaactgccgggcga

SEQ ID NO: 523 - DNA, 21 bp, Artificial Sequence
  n-mer motif encoding polynucleotide
caaaaatcggaaacctacact

SEQ ID NO: 524 - DNA, 21 bp, Artificial Sequence
  n-mer motif encoding polynucleotide
gcacttacccgtatgcctaac

SEQ ID NO: 525 - DNA, 21 bp, Artificial Sequence
  n-mer motif encoding polynucleotide
cgtaacggctccgcccaaagc

SEQ ID NO: 526 - DNA, 21 bp, Artificial Sequence
  n-mer motif encoding polynucleotide
gcgagggatacgcctgggatt

SEQ ID NO: 527 - DNA, 21 bp, Artificial Sequence
  n-mer motif encoding polynucleotide
attgttaatgctgagatttat

SEQ ID NO: 528 - DNA, 21 bp, Artificial Sequence
  n-mer motif encoding polynucleotide
cgacaaggcgacttaaaagaa

SEQ ID NO: 529 - DNA, 21 bp, Artificial Sequence
  n-mer motif encoding polynucleotide
cgaaacaacccatcgcacgac

SEQ ID NO: 530 - DNA, 21 bp, Artificial Sequence
  n-mer motif encoding polynucleotide
ctcgcccacaactacttaagc

SEQ ID NO: 531 - DNA, 21 bp, Artificial Sequence
  n-mer motif encoding polynucleotide
aacacccacaacctacaaatg

SEQ ID NO: 532 - DNA, 21 bp, Artificial Sequence
  n-mer motif encoding polynucleotide
cgaggagaccacagcacacag

SEQ ID NO: 533 - DNA, 21 bp, Artificial Sequence
  n-mer motif encoding polynucleotide
ctccacggagtcagcagtata

SEQ ID NO: 534 - DNA, 21 bp, Artificial Sequence
  n-mer motif encoding polynucleotide
ggtattaatcatgtggcgtct

SEQ ID NO: 535 - DNA, 21 bp, Artificial Sequence
  n-mer motif encoding polynucleotide
actgataagcttcagggtgtg

SEQ ID NO: 536 - DNA, 21 bp, Artificial Sequence
  n-mer motif encoding polynucleotide
ggaacctccatagactacgta

SEQ ID NO: 537 - DNA, 21 bp, Artificial Sequence
  n-mer motif encoding polynucleotide
tcgaacactgccccccccccc

SEQ ID NO: 538 - DNA, 21 bp, Artificial Sequence
  n-mer motif encoding polynucleotide
actgctaagagttatgggcct

SEQ ID NO: 539 - DNA, 21 bp, Artificial Sequence
  n-mer motif encoding polynucleotide
gaccaccaacaagcactagct

SEQ ID NO: 540 - DNA, 21 bp, Artificial Sequence
  n-mer motif encoding polynucleotide
acacaagtagtcgcaagaaca

SEQ ID NO: 541 - DNA, 21 bp, Artificial Sequence
  n-mer motif encoding polynucleotide
agtcctcctagtacgtcgggt

SEQ ID NO: 542 - DNA, 21 bp, Artificial Sequence
  n-mer motif encoding polynucleotide
cctatgcgaacaccaccgtac

SEQ ID NO: 543 - DNA, 21 bp, Artificial Sequence
  n-mer motif encoding polynucleotide
gctgctggtaatactactcgt

SEQ ID NO: 544 - DNA, 21 bp, Artificial Sequence
  n-mer motif encoding polynucleotide
agaggcgactaatccacaccc

SEQ ID NO: 545 - DNA, 21 bp, Artificial Sequence
  n-mer motif encoding polynucleotide
ctagcgaaaactgtcgctatc

SEQ ID NO: 546 - DNA, 21 bp, Artificial Sequence
  n-mer motif encoding polynucleotide
tctaaatctgaaaacctgcaa

SEQ ID NO: 547 - DNA, 21 bp, Artificial Sequence
  n-mer motif encoding polynucleotide
actcagacgtcgtatgctacg

SEQ ID NO: 548 - DNA, 21 bp, Artificial Sequence
  n-mer motif encoding polynucleotide
actggggataggacttcggtg

SEQ ID NO: 549 - DNA, 21 bp, Artificial Sequence
  n-mer motif encoding polynucleotide
atatcgcaaggctcgagcctc

SEQ ID NO: 550 - DNA, 21 bp, Artificial Sequence
  n-mer motif encoding polynucleotide
cttgttcagatggggagtgtg

SEQ ID NO: 551 - DNA, 21 bp, Artificial Sequence
  n-mer motif encoding polynucleotide
ttatccgcaacatctacgatg

SEQ ID NO: 552 - DNA, 21 bp, Artificial Sequence
  n-mer motif encoding polynucleotide
caaaaccacaacgaactaaaa

SEQ ID NO: 553 - DNA, 21 bp, Artificial Sequence
  n-mer motif encoding polynucleotide
cgtggtgcgcctgagcatgcg

SEQ ID NO: 554 - DNA, 21 bp, Artificial Sequence
  n-mer motif encoding polynucleotide
tcttctttcggaaaagacaac

SEQ ID NO: 555 - DNA, 21 bp, Artificial Sequence
  n-mer motif encoding polynucleotide
aacgctaacgccggtggaaac

SEQ ID NO: 556 - DNA, 21 bp, Artificial Sequence
  n-mer motif encoding polynucleotide
gatcatcatcctcagagtcgt

SEQ ID NO: 557 - DNA, 21 bp, Artificial Sequence
  n-mer motif encoding polynucleotide
atgaggcatgaggctcctctt

SEQ ID NO: 558 - DNA, 21 bp, Artificial Sequence
  n-mer motif encoding polynucleotide
aagggggatggtgcttatgag

SEQ ID NO: 559 - DNA, 21 bp, Artificial Sequence
  n-mer motif encoding polynucleotide
cctatgaatggtattctgttg

SEQ ID NO: 560 - DNA, 21 bp, Artificial Sequence
  n-mer motif encoding polynucleotide
agtagtgggggtatgaaggcg

SEQ ID NO: 561 - DNA, 21 bp, Artificial Sequence
  n-mer motif encoding polynucleotide
gtgctggttactcagaatcat

SEQ ID NO: 562 - DNA, 21 bp, Artificial Sequence
  n-mer motif encoding polynucleotide
gagattaataatcggactggt

SEQ ID NO: 563 - DNA, 21 bp, Artificial Sequence
  n-mer motif encoding polynucleotide
ttaccaacaggcgtcctgccc

SEQ ID NO: 564 - DNA, 21 bp, Artificial Sequence
  n-mer motif encoding polynucleotide
gcctacggtatcagagaagtg

SEQ ID NO: 565 - DNA, 21 bp, Artificial Sequence
  n-mer motif encoding polynucleotide
tcgacaaactctataggcgcc

SEQ ID NO: 566 - DNA, 21 bp, Artificial Sequence
  n-mer motif encoding polynucleotide
gtgcagttgacgcataatggg

SEQ ID NO: 567 - DNA, 21 bp, Artificial Sequence
  n-mer motif encoding polynucleotide
gttcagttggagaatgcgaat

SEQ ID NO: 568 - DNA, 21 bp, Artificial Sequence
  n-mer motif encoding polynucleotide
ggaaaagccaacgacggttct

SEQ ID NO: 569 - DNA, 21 bp, Artificial Sequence
  n-mer motif encoding polynucleotide
accggggttcgagaaaccata

SEQ ID NO: 570 - DNA, 21 bp, Artificial Sequence
  n-mer motif encoding polynucleotide
ggcctgaaccagatcacatcg

SEQ ID NO: 571 - DNA, 21 bp, Artificial Sequence
  n-mer motif encoding polynucleotide
acggagaaggcgagtcctctg

SEQ ID NO: 572 - DNA, 21 bp, Artificial Sequence
  n-mer motif encoding polynucleotide
tttctggagggtgttgcgcag

SEQ ID NO: 573 - DNA, 21 bp, Artificial Sequence
  n-mer motif encoding polynucleotide
acgaattataatattggtccg

SEQ ID NO: 574 - DNA, 21 bp, Artificial Sequence
  n-mer motif encoding polynucleotide
agaggagacttgacaaccaca

SEQ ID NO: 575 - DNA, 21 bp, Artificial Sequence
  n-mer motif encoding polynucleotide
atgatgaatgtgagtggtcat

SEQ ID NO: 576 - DNA, 21 bp, Artificial Sequence
  n-mer motif encoding polynucleotide
tctcagtcgattaatgggctt

SEQ ID NO: 577 - DNA, 21 bp, Artificial Sequence
  n-mer motif encoding polynucleotide
ctcacgactttaactaaccac

SEQ ID NO: 578 - DNA, 21 bp, Artificial Sequence
  n-mer motif encoding polynucleotide
aactctgttcaatccacccca

SEQ ID NO: 579 - DNA, 21 bp, Artificial Sequence
  n-mer motif encoding polynucleotide
tataatacggatcggactaat

SEQ ID NO: 580 - DNA, 21 bp, Artificial Sequence
  n-mer motif encoding polynucleotide
gagaagcctcagcataatagt

SEQ ID NO: 581 - DNA, 21 bp, Artificial Sequence
  n-mer motif encoding polynucleotide
acgatggctacaaacttaagt

SEQ ID NO: 582 - DNA, 21 bp, Artificial Sequence
  n-mer motif encoding polynucleotide
gtggggacgcatttgcattcg

SEQ ID NO: 583 - DNA, 21 bp, Artificial Sequence
  n-mer motif encoding polynucleotide
gacgcccaccactcaagcagc

SEQ ID NO: 584 - DNA, 21 bp, Artificial Sequence
  n-mer motif encoding polynucleotide
cttgtggggactttggtgtat

SEQ ID NO: 585 - DNA, 21 bp, Artificial Sequence
  n-mer motif encoding polynucleotide
tatggtgtgcaggcgaatagt

SEQ ID NO: 586 - DNA, 21 bp, Artificial Sequence
  n-mer motif encoding polynucleotide
gttttgtctgataaggcgtat

SEQ ID NO: 587 - DNA, 21 bp, Artificial Sequence
  n-mer motif encoding polynucleotide
cttgagggtcagaataagacg

SEQ ID NO: 588 - DNA, 21 bp, Artificial Sequence
  n-mer motif encoding polynucleotide
gaggttagtaataataattat

SEQ ID NO: 589 - DNA, 21 bp, Artificial Sequence
  n-mer motif encoding polynucleotide
gcccaccaacaagccctagct

SEQ ID NO: 590 - DNA, 21 bp, Artificial Sequence
  n-mer motif encoding polynucleotide
cttccgaccacactcaaccac

SEQ ID NO: 591 - DNA, 21 bp, Artificial Sequence
  n-mer motif encoding polynucleotide
tacatagcaggtggtgaacaa

SEQ ID NO: 592 - DNA, 21 bp, Artificial Sequence
  n-mer motif encoding polynucleotide
aattctggtactctttatcag

SEQ ID NO: 593 - DNA, 21 bp, Artificial Sequence
  n-mer motif encoding polynucleotide
cggggtctgcctgatgttaat

SEQ ID NO: 594 - DNA, 21 bp, Artificial Sequence
  n-mer motif encoding polynucleotide
aaccaacaactatcccactca

SEQ ID NO: 595 - DNA, 21 bp, Artificial Sequence
  n-mer motif encoding polynucleotide
aatcctagttatgatcatcgg

SEQ ID NO: 596 - DNA, 21 bp, Artificial Sequence
  n-mer motif encoding polynucleotide
atagacagcgacaccttcgta

SEQ ID NO: 597 - DNA, 21 bp, Artificial Sequence
  n-mer motif encoding polynucleotide
accgcttaccttgcgggatta

SEQ ID NO: 598 - DNA, 21 bp, Artificial Sequence
  n-mer motif encoding polynucleotide
catagtaatgttagtcttgag

SEQ ID NO: 599 - DNA, 21 bp, Artificial Sequence
  n-mer motif encoding polynucleotide
ggtaataatttgagtttgtct

SEQ ID NO: 600 - DNA, 21 bp, Artificial Sequence
  n-mer motif encoding polynucleotide
gttatggatacgcatgggatg

SEQ ID NO: 601 - DNA, 21 bp, Artificial Sequence
  n-mer motif encoding polynucleotide
gcgtataatatgtcgtctgtt

SEQ ID NO: 602 - DNA, 21 bp, Artificial Sequence
  n-mer motif encoding polynucleotide
actaacgccatctctcaaacg

SEQ ID NO: 603 - DNA, 21 bp, Artificial Sequence
  n-mer motif encoding polynucleotide
gcaacacacgccatgcgccca

SEQ ID NO: 604 - DNA, 21 bp, Artificial Sequence
  n-mer motif encoding polynucleotide
atgttaaacaacacaatgatg

SEQ ID NO: 605 - DNA, 21 bp, Artificial Sequence
  n-mer motif encoding polynucleotide
attagttcggggattttgtcg

SEQ ID NO: 606 - DNA, 21 bp, Artificial Sequence
  n-mer motif encoding polynucleotide
cgccaaggcagcttgatgata

SEQ ID NO: 607 - DNA, 21 bp, Artificial Sequence
  n-mer motif encoding polynucleotide
acgactgataagggtattaat

SEQ ID NO: 608 - DNA, 21 bp, Artificial Sequence
  n-mer motif encoding polynucleotide
cacaacttaatgacccaaata

SEQ ID NO: 609 - DNA, 21 bp, Artificial Sequence
  n-mer motif encoding polynucleotide
aaccaaaacacctacgaactg

SEQ ID NO: 610 - DNA, 21 bp, Artificial Sequence
  n-mer motif encoding polynucleotide
gctaacaccgtcacagaacga

SEQ ID NO: 611 - DNA, 21 bp, Artificial Sequence
  n-mer motif encoding polynucleotide
tctacgctgcagactaatggt

SEQ ID NO: 612 - DNA, 21 bp, Artificial Sequence
  n-mer motif encoding polynucleotide
cccaacgaatacaaagcaccg

SEQ ID NO: 613 - DNA, 21 bp, Artificial Sequence
  n-mer motif encoding polynucleotide
atgcaaacacgctcggacaca

SEQ ID NO: 614 - DNA, 21 bp, Artificial Sequence
  n-mer motif encoding polynucleotide
ggaacagggtacgctggatca

SEQ ID NO: 615 - DNA, 21 bp, Artificial Sequence
  n-mer motif encoding polynucleotide
atgggtatgcagaatacgcat

SEQ ID NO: 616 - DNA, 21 bp, Artificial Sequence
  n-mer motif encoding polynucleotide
tctagtaaggagcgtacatcg

SEQ ID NO: 617 - DNA, 21 bp, Artificial Sequence
  n-mer motif encoding polynucleotide
cgaacggacaccccctacacc

SEQ ID NO: 618 - DNA, 21 bp, Artificial Sequence
  n-mer motif encoding polynucleotide
actgcgctgcgggataataag

SEQ ID NO: 619 - DNA, 21 bp, Artificial Sequence
  n-mer motif encoding polynucleotide
aggatgtctgagagttcggat

SEQ ID NO: 620 - DNA, 21 bp, Artificial Sequence
  n-mer motif encoding polynucleotide
aaccaatctataagcatggac

SEQ ID NO: 621 - DNA, 21 bp, Artificial Sequence
  n-mer motif encoding polynucleotide
tcgcttgggcatagtaataat

SEQ ID NO: 622 - DNA, 21 bp, Artificial Sequence
  n-mer motif encoding polynucleotide
cttaatagtggtggtgcgatg

SEQ ID NO: 623 - DNA, 21 bp, Artificial Sequence
  n-mer motif encoding polynucleotide
aacgaacaattcgaaaaagtc

SEQ ID NO: 624 - DNA, 21 bp, Artificial Sequence
  n-mer motif encoding polynucleotide
atgatggcgaataatatgcag

SEQ ID NO: 625 - DNA, 21 bp, Artificial Sequence
  n-mer motif encoding polynucleotide
agtcggcgcgaagaacaacca

SEQ ID NO: 626 - DNA, 21 bp, Artificial Sequence
  n-mer motif encoding polynucleotide
gcgactatgacttcgtcgacg

SEQ ID NO: 627 - DNA, 21 bp, Artificial Sequence
  n-mer motif encoding polynucleotide
cgtggttcagacggaggattg

SEQ ID NO: 628 - DNA, 21 bp, Artificial Sequence
  n-mer motif encoding polynucleotide
agtttgacgcctaataatctt

SEQ ID NO: 629 - DNA, 21 bp, Artificial Sequence
  n-mer motif encoding polynucleotide
gctactctttctccgcatgct

SEQ ID NO: 630 - DNA, 21 bp, Artificial Sequence
  n-mer motif encoding polynucleotide
tatctgcaggagaagtttcct

SEQ ID NO: 631 - DNA, 21 bp, Artificial Sequence
  n-mer motif encoding polynucleotide
ggcaccgggtacccaaaccaa

SEQ ID NO: 632 - DNA, 21 bp, Artificial Sequence
  n-mer motif encoding polynucleotide
aattatccttcggttcaggag

SEQ ID NO: 633 - DNA, 21 bp, Artificial Sequence
  n-mer motif encoding polynucleotide
actgacgcatcgggtagatca

SEQ ID NO: 634 - DNA, 21 bp, Artificial Sequence
  n-mer motif encoding polynucleotide
cgtgtgattactgcgggtgat

SEQ ID NO: 635 - DNA, 21 bp, Artificial Sequence
  n-mer motif encoding polynucleotide
gtgactgtgagtaatagtctg

SEQ ID NO: 636 - DNA, 21 bp, Artificial Sequence
  n-mer motif encoding polynucleotide
ttgttgacggctccgcatagg

SEQ ID NO: 637 - DNA, 21 bp, Artificial Sequence
  n-mer motif encoding polynucleotide
tcaatcgcaaaccacatgata

SEQ ID NO: 638 - DNA, 21 bp, Artificial Sequence
  n-mer motif encoding polynucleotide
atgccttcgaaaggcgaagta

SEQ ID NO: 639 - DNA, 21 bp, Artificial Sequence
  n-mer motif encoding polynucleotide
aacatgaccaacgaacggctc

SEQ ID NO: 640 - DNA, 21 bp, Artificial Sequence
  n-mer motif encoding polynucleotide
tcattctcttcaggcataatg

SEQ ID NO: 641 - DNA, 21 bp, Artificial Sequence
  n-mer motif encoding polynucleotide
cgcgaccgtcaagactcggta

SEQ ID NO: 642 - DNA, 21 bp, Artificial Sequence
  n-mer motif encoding polynucleotide
cacggtgaccgaacagcttta

SEQ ID NO: 643 - DNA, 21 bp, Artificial Sequence
  n-mer motif encoding polynucleotide
gaagtacggggcagcgtgcca

SEQ ID NO: 644 - DNA, 21 bp, Artificial Sequence
  n-mer motif encoding polynucleotide
ctgatttcgactggtaataat

SEQ ID NO: 645 - DNA, 21 bp, Artificial Sequence
  n-mer motif encoding polynucleotide
ccaacatctggggacaaaccg

SEQ ID NO: 646 - DNA, 21 bp, Artificial Sequence
  n-mer motif encoding polynucleotide
aaagcggaccacagtggggca

SEQ ID NO: 647 - DNA, 21 bp, Artificial Sequence
  n-mer motif encoding polynucleotide
ctaaacgacgtctaccgtaaa

SEQ ID NO: 648 - DNA, 21 bp, Artificial Sequence
  n-mer motif encoding polynucleotide
aacagtttgcaagcaagtgca

SEQ ID NO: 649 - DNA, 21 bp, Artificial Sequence
  n-mer motif encoding polynucleotide
tatcataatgagattatgacg

SEQ ID NO: 650 - DNA, 21 bp, Artificial Sequence
  n-mer motif encoding polynucleotide
aacaacaccctaaacatccta

SEQ ID NO: 651 - DNA, 21 bp, Artificial Sequence
  n-mer motif encoding polynucleotide
tcttatgggcagggtctggag

SEQ ID NO: 652 - DNA, 21 bp, Artificial Sequence
  n-mer motif encoding polynucleotide
atgataaaaaccaacatgttg

SEQ ID NO: 653 - DNA, 21 bp, Artificial Sequence
  n-mer motif encoding polynucleotide
accgaagcgggccgcccccaa

SEQ ID NO: 654 - DNA, 21 bp, Artificial Sequence
  n-mer motif encoding polynucleotide
aggattgatcagactaatgtg

SEQ ID NO: 655 - DNA, 21 bp, Artificial Sequence
  n-mer motif encoding polynucleotide
gaggggcataatcgtggtatt

SEQ ID NO: 656 - DNA, 21 bp, Artificial Sequence
  n-mer motif encoding polynucleotide
atggggactgagtatcgtatg

SEQ ID NO: 657 - DNA, 21 bp, Artificial Sequence
  n-mer motif encoding polynucleotide
tcgggtatgaatagtaataag

SEQ ID NO: 658 - DNA, 21 bp, Artificial Sequence
  n-mer motif encoding polynucleotide
ttgactaatgataataagttg

SEQ ID NO: 659 - DNA, 21 bp, Artificial Sequence
  n-mer motif encoding polynucleotide
ttacacaactaccaagaccgt

SEQ ID NO: 660 - DNA, 21 bp, Artificial Sequence
  n-mer motif encoding polynucleotide
aagtctaatttggagggtaag

SEQ ID NO: 661 - DNA, 21 bp, Artificial Sequence
  n-mer motif encoding polynucleotide
cttactggtcagaatgcgatt

SEQ ID NO: 662 - DNA, 21 bp, Artificial Sequence
  n-mer motif encoding polynucleotide
catactgtgggggctatgcat

SEQ ID NO: 663 - DNA, 21 bp, Artificial Sequence
  n-mer motif encoding polynucleotide
ctccaactggctacatcccac

SEQ ID NO: 664 - DNA, 21 bp, Artificial Sequence
  n-mer motif encoding polynucleotide
agtctgaatggggtgttggtt

SEQ ID NO: 665 - DNA, 21 bp, Artificial Sequence
  n-mer motif encoding polynucleotide
agtcacaaccaagtaaacgta

SEQ ID NO: 666 - DNA, 21 bp, Artificial Sequence
  n-mer motif encoding polynucleotide
agtttgagtactgatgtgttt

SEQ ID NO: 667 - DNA, 21 bp, Artificial Sequence
  n-mer motif encoding polynucleotide
atggtaggtcgtgccgaaatc

SEQ ID NO: 668 - DNA, 21 bp, Artificial Sequence
  n-mer motif encoding polynucleotide
ttgtctagtatgagtacggat

SEQ ID NO: 669 - DNA, 21 bp, Artificial Sequence
  n-mer motif encoding polynucleotide
tcctacagtacttcaacaccg

SEQ ID NO: 670 - DNA, 21 bp, Artificial Sequence
  n-mer motif encoding polynucleotide
tccgaattaatggtcagaccc

SEQ ID NO: 671 - DNA, 21 bp, Artificial Sequence
  n-mer motif encoding polynucleotide
tggaacggaaacgccacacaa

SEQ ID NO: 672 - DNA, 21 bp, Artificial Sequence
  n-mer motif encoding polynucleotide
atggatactgagctttatagg

SEQ ID NO: 673 - DNA, 21 bp, Artificial Sequence
  n-mer motif encoding polynucleotide
aggacgagtcctgatacgaat

SEQ ID NO: 674 - DNA, 21 bp, Artificial Sequence
  n-mer motif encoding polynucleotide
ttctcaacgcaagacataagc

SEQ ID NO: 675 - DNA, 21 bp, Artificial Sequence
  n-mer motif encoding polynucleotide
acgactgtgctggggaataat

SEQ ID NO: 676 - DNA, 21 bp, Artificial Sequence
  n-mer motif encoding polynucleotide
cagcgtgatgctgcgtatgct

SEQ ID NO: 677 - DNA, 21 bp, Artificial Sequence
  n-mer motif encoding polynucleotide
caccaaaccgtggtccctact

SEQ ID NO: 678 - DNA, 21 bp, Artificial Sequence
  n-mer motif encoding polynucleotide
tctaatccgggtaatcataat

SEQ ID NO: 679 - DNA, 21 bp, Artificial Sequence
  n-mer motif encoding polynucleotide
tgggagactatggctaagcct

SEQ ID NO: 680 - DNA, 21 bp, Artificial Sequence
  n-mer motif encoding polynucleotide
ggtctttatcagaatcctacg

SEQ ID NO: 681 - DNA, 21 bp, Artificial Sequence
  n-mer motif encoding polynucleotide
cttaatcttactaatcataat

SEQ ID NO: 682 - DNA, 21 bp, Artificial Sequence
  n-mer motif encoding polynucleotide
atgagtctcgcctccacccaa

SEQ ID NO: 683 - DNA, 21 bp, Artificial Sequence
  n-mer motif encoding polynucleotide
acgtcccaaaccgtccgagta

SEQ ID NO: 684 - DNA, 21 bp, Artificial Sequence
  n-mer motif encoding polynucleotide
ggagcaacggtcaacacgcga

SEQ ID NO: 685 - DNA, 21 bp, Artificial Sequence
  n-mer motif encoding polynucleotide
aaagggggaaacctcaccgca

SEQ ID NO: 686 - DNA, 21 bp, Artificial Sequence
  n-mer motif encoding polynucleotide
gcgtggtctcaagtcctgacg

SEQ ID NO: 687 - DNA, 21 bp, Artificial Sequence
  n-mer motif encoding polynucleotide
gtagaacacgtagcccaccaa

SEQ ID NO: 688 - DNA, 21 bp, Artificial Sequence
  n-mer motif encoding polynucleotide
ctaatgtcgtcctactcatca

SEQ ID NO: 689 - DNA, 21 bp, Artificial Sequence
  n-mer motif encoding polynucleotide
tctctgggtgggaatccgcct

SEQ ID NO: 690 - DNA, 21 bp, Artificial Sequence
  n-mer motif encoding polynucleotide
aagaatgagaatacgaattat

SEQ ID NO: 691 - DNA, 21 bp, Artificial Sequence
  n-mer motif encoding polynucleotide
atattggacaaccaccgtttc

SEQ ID NO: 692 - DNA, 21 bp, Artificial Sequence
  n-mer motif encoding polynucleotide
aattcgtcgcatgttaattct

SEQ ID NO: 693 - DNA, 21 bp, Artificial Sequence
  n-mer motif encoding polynucleotide
caggtgcagcatgagagggtg

SEQ ID NO: 694 - DNA, 21 bp, Artificial Sequence
  n-mer motif encoding polynucleotide
ttgggaggaaccctgggaata

SEQ ID NO: 695 - DNA, 21 bp, Artificial Sequence
  n-mer motif encoding polynucleotide
actcaagaacgaccactaatc

SEQ ID NO: 696 - DNA, 21 bp, Artificial Sequence
  n-mer motif encoding polynucleotide
cgtaagactgaggataggatg

SEQ ID NO: 697 - DNA, 21 bp, Artificial Sequence
  n-mer motif encoding polynucleotide
accgaactcacagcgcggaac

SEQ ID NO: 698 - DNA, 21 bp, Artificial Sequence
  n-mer motif encoding polynucleotide
cgcggcgacaacacttactcc

SEQ ID NO: 699 - DNA, 21 bp, Artificial Sequence
  n-mer motif encoding polynucleotide
cagtctaatactaataatagt

SEQ ID NO: 700 - DNA, 21 bp, Artificial Sequence
  n-mer motif encoding polynucleotide
gcttcttatagtatttctgat

SEQ ID NO: 701 - DNA, 21 bp, Artificial Sequence
  n-mer motif encoding polynucleotide
agcgaacaccacgccggaata

SEQ ID NO: 702 - DNA, 21 bp, Artificial Sequence
  n-mer motif encoding polynucleotide
cgtggtgcgccagagcatgcg

SEQ ID NO: 703 - DNA, 21 bp, Artificial Sequence
  n-mer motif encoding polynucleotide
aattttagtagtggtgatgtt

SEQ ID NO: 704 - DNA, 21 bp, Artificial Sequence
  n-mer motif encoding polynucleotide
agtggcatcaacgccaccgac

SEQ ID NO: 705 - DNA, 21 bp, Artificial Sequence
  n-mer motif encoding polynucleotide
cgggctgatgtttcttggtct

SEQ ID NO: 706 - DNA, 21 bp, Artificial Sequence
  n-mer motif encoding polynucleotide
tgtatggatgttggtaaggcg

SEQ ID NO: 707 - DNA, 21 bp, Artificial Sequence
  n-mer motif encoding polynucleotide
ggggtcggagccacttcggta

SEQ ID NO: 708 - DNA, 21 bp, Artificial Sequence
  n-mer motif encoding polynucleotide
aaaaacaacaactcagacagt

SEQ ID NO: 709 - DNA, 21 bp, Artificial Sequence
  n-mer motif encoding polynucleotide
aatgttgcgagtattgatagg

SEQ ID NO: 710 - DNA, 21 bp, Artificial Sequence
  n-mer motif encoding polynucleotide
aatagtgtgaatggtcttctg

SEQ ID NO: 711 - DNA, 21 bp, Artificial Sequence
  n-mer motif encoding polynucleotide
acactagaccgaaaccaaacc

SEQ ID NO: 712 - DNA, 21 bp, Artificial Sequence
  n-mer motif encoding polynucleotide
gaccaaaacttcgaacgtaga

SEQ ID NO: 713 - DNA, 21 bp, Artificial Sequence
  n-mer motif encoding polynucleotide
gtcggtgacaggaacttggtc

SEQ ID NO: 714 - DNA, 21 bp, Artificial Sequence
  n-mer motif encoding polynucleotide
ttagaagtaaacctgcaaacg

SEQ ID NO: 715 - DNA, 21 bp, Artificial Sequence
  n-mer motif encoding polynucleotide
actaatggggggtcgcttaat

SEQ ID NO: 716 - DNA, 21 bp, Artificial Sequence
  n-mer motif encoding polynucleotide
ttcacgcgcacaccagtaacc

SEQ ID NO: 717 - DNA, 21 bp, Artificial Sequence
  n-mer motif encoding polynucleotide
acaccggcggaaagcaaagtt

SEQ ID NO: 718 - DNA, 21 bp, Artificial Sequence
  n-mer motif encoding polynucleotide
tttccttcgcataatggggcg

SEQ ID NO: 719 - DNA, 21 bp, Artificial Sequence
  n-mer motif encoding polynucleotide
gccaggaacgtaatgctgggg

SEQ ID NO: 720 - DNA, 21 bp, Artificial Sequence
  n-mer motif encoding polynucleotide
acgattcaggatcatattaag

SEQ ID NO: 721 - DNA, 21 bp, Artificial Sequence
  n-mer motif encoding polynucleotide
attaattcgtatttgcatgag

SEQ ID NO: 722 - DNA, 21 bp, Artificial Sequence
  n-mer motif encoding polynucleotide
gcgcatgatgttactgtgaat

SEQ ID NO: 723 - DNA, 21 bp, Artificial Sequence
  n-mer motif encoding polynucleotide
actgtgggggttcagcagacg

SEQ ID NO: 724 - DNA, 21 bp, Artificial Sequence
  n-mer motif encoding polynucleotide
acaggtagttcagacagatta

SEQ ID NO: 725 - DNA, 21 bp, Artificial Sequence
  n-mer motif encoding polynucleotide
aatcatgatactgctcatgct

SEQ ID NO: 726 - DNA, 21 bp, Artificial Sequence
  n-mer motif encoding polynucleotide
gccgaatcccaactagctagc

SEQ ID NO: 727 - DNA, 21 bp, Artificial Sequence
  n-mer motif encoding polynucleotide
ggtaatgcgtataatacgact

SEQ ID NO: 728 - DNA, 21 bp, Artificial Sequence
  n-mer motif encoding polynucleotide
aatcatcaggctggtactact

SEQ ID NO: 729 - DNA, 21 bp, Artificial Sequence
  n-mer motif encoding polynucleotide
acggtaggagaaaaccaccga

SEQ ID NO: 730 - DNA, 21 bp, Artificial Sequence
  n-mer motif encoding polynucleotide
ctaactactaaaatacccctc

SEQ ID NO: 731 - DNA, 21 bp, Artificial Sequence
  n-mer motif encoding polynucleotide
actaattatcctgaggcgaat

SEQ ID NO: 732 - DNA, 21 bp, Artificial Sequence
  n-mer motif encoding polynucleotide
aatactgctccgccgaatcat

SEQ ID NO: 733 - DNA, 21 bp, Artificial Sequence
  n-mer motif encoding polynucleotide
gtgctgagtacggggctgcgg

SEQ ID NO: 734 - DNA, 21 bp, Artificial Sequence
  n-mer motif encoding polynucleotide
ctcacgtcccactctgcgggc

SEQ ID NO: 735 - DNA, 21 bp, Artificial Sequence
  n-mer motif encoding polynucleotide
atgaataagcatggtgtgctt

SEQ ID NO: 736 - DNA, 21 bp, Artificial Sequence
  n-mer motif encoding polynucleotide
gacctgaccagagctgcaata

SEQ ID NO: 737 - DNA, 21 bp, Artificial Sequence
  n-mer motif encoding polynucleotide
tatattgtggatcatgcgaat

SEQ ID NO: 738 - DNA, 21 bp, Artificial Sequence
  n-mer motif encoding polynucleotide
agtgggcctgagaatacgttg

SEQ ID NO: 739 - DNA, 21 bp, Artificial Sequence
  n-mer motif encoding polynucleotide
cgttatggtgatacgggtatg

SEQ ID NO: 740 - DNA, 21 bp, Artificial Sequence
  n-mer motif encoding polynucleotide
gatggtaagaatagttatgcg

SEQ ID NO: 741 - DNA, 21 bp, Artificial Sequence
  n-mer motif encoding polynucleotide
gaggcgcataatcgtgttatt

SEQ ID NO: 742 - DNA, 21 bp, Artificial Sequence
  n-mer motif encoding polynucleotide
agtttgcaggctggtaggatg

SEQ ID NO: 743 - DNA, 21 bp, Artificial Sequence
  n-mer motif encoding polynucleotide
gatgcgaaggctcttacgact

SEQ ID NO: 744 - DNA, 21 bp, Artificial Sequence
  n-mer motif encoding polynucleotide
accgacacccgaaaaaacgac

SEQ ID NO: 745 - DNA, 21 bp, Artificial Sequence
  n-mer motif encoding polynucleotide
gactcttcacactactcgaca

SEQ ID NO: 746 - DNA, 21 bp, Artificial Sequence
  n-mer motif encoding polynucleotide
acaatgcaccttcccaacctg

SEQ ID NO: 747 - DNA, 21 bp, Artificial Sequence
  n-mer motif encoding polynucleotide
cgagacggctctactaaagtt

SEQ ID NO: 748 - DNA, 21 bp, Artificial Sequence
  n-mer motif encoding polynucleotide
tcagggtaccaaatgacagaa

SEQ ID NO: 749 - DNA, 21 bp, Artificial Sequence
  n-mer motif encoding polynucleotide
tgcgacttgtcacaatcatgc

SEQ ID NO: 750 - DNA, 21 bp, Artificial Sequence
  n-mer motif encoding polynucleotide
agaaacgcgtcaaacggcgta

SEQ ID NO: 751 - DNA, 21 bp, Artificial Sequence
  n-mer motif encoding polynucleotide
cagtcgcagaatgtgactcag

SEQ ID NO: 752 - DNA, 21 bp, Artificial Sequence
  n-mer motif encoding polynucleotide
gattctgctccgagtactatt

SEQ ID NO: 753 - DNA, 21 bp, Artificial Sequence
  n-mer motif encoding polynucleotide
aggtccgtaccatcaccacac

SEQ ID NO: 754 - DNA, 21 bp, Artificial Sequence
  n-mer motif encoding polynucleotide
atgacgtctgcgtctcgtggt

SEQ ID NO: 755 - DNA, 21 bp, Artificial Sequence
  n-mer motif encoding polynucleotide
gctcttgctagtcgtcctatg

SEQ ID NO: 756 - DNA, 21 bp, Artificial Sequence
  n-mer motif encoding polynucleotide
ctaaacctctccaacgactgg

SEQ ID NO: 757 - DNA, 21 bp, Artificial Sequence
  n-mer motif encoding polynucleotide
gtttctacggcgcagaggcag

SEQ ID NO: 758 - DNA, 21 bp, Artificial Sequence
  n-mer motif encoding polynucleotide
cacgccgacgttggcatgagc

SEQ ID NO: 759 - DNA, 21 bp, Artificial Sequence
  n-mer motif encoding polynucleotide
gcggggggtttgctgtcgcgg

SEQ ID NO: 760 - DNA, 21 bp, Artificial Sequence
  n-mer motif encoding polynucleotide
catcttagtcaggctaatcat

SEQ ID NO: 761 - DNA, 21 bp, Artificial Sequence
  n-mer motif encoding polynucleotide
gtgcataatcctactactacg

SEQ ID NO: 762 - DNA, 21 bp, Artificial Sequence
  n-mer motif encoding polynucleotide
tctcagcggaatccggatgat

SEQ ID NO: 763 - DNA, 21 bp, Artificial Sequence
  n-mer motif encoding polynucleotide
agggagactaataattttgcg

SEQ ID NO: 764 - DNA, 21 bp, Artificial Sequence
  n-mer motif encoding polynucleotide
aatgcgggggctcttatgggt

SEQ ID NO: 765 - DNA, 21 bp, Artificial Sequence
  n-mer motif encoding polynucleotide
ttgccgaagactgtgaatatg

SEQ ID NO: 766 - DNA, 21 bp, Artificial Sequence
  n-mer motif encoding polynucleotide
gcaagtgacctacaaatgacg

SEQ ID NO: 767 - DNA, 21 bp, Artificial Sequence
  n-mer motif encoding polynucleotide
caagccctggccaccacaaac

SEQ ID NO: 768 - DNA, 21 bp, Artificial Sequence
  n-mer motif encoding polynucleotide
catgagtcgtctggttatcat

SEQ ID NO: 769 - DNA, 21 bp, Artificial Sequence
  n-mer motif encoding polynucleotide
ggggtgaatgatcgtgctagg

SEQ ID NO: 770 - DNA, 21 bp, Artificial Sequence
  n-mer motif encoding polynucleotide
cctcgggatgctcttcgtact

SEQ ID NO: 771 - DNA, 21 bp, Artificial Sequence
  n-mer motif encoding polynucleotide
aacgactcctcgtcaatgtcc

SEQ ID NO: 772 - DNA, 21 bp, Artificial Sequence
  n-mer motif encoding polynucleotide
gaatacaacacgcgccacgac

SEQ ID NO: 773 - DNA, 21 bp, Artificial Sequence
  n-mer motif encoding polynucleotide
gcgtctccggcgcatacgtct

SEQ ID NO: 774 - DNA, 21 bp, Artificial Sequence
  n-mer motif encoding polynucleotide
caaaacagcaacactccctca

SEQ ID NO: 775 - DNA, 21 bp, Artificial Sequence
  n-mer motif encoding polynucleotide
ttggcaaaactagggaactac

SEQ ID NO: 776 - DNA, 21 bp, Artificial Sequence
  n-mer motif encoding polynucleotide
gctagtgataggcagtctggt

SEQ ID NO: 777 - DNA, 21 bp, Artificial Sequence
  n-mer motif encoding polynucleotide
tatcagaatggtgtgcttcct

SEQ ID NO: 778 - DNA, 21 bp, Artificial Sequence
  n-mer motif encoding polynucleotide
aataagtttggttataatcct

SEQ ID NO: 779 - DNA, 21 bp, Artificial Sequence
  n-mer motif encoding polynucleotide
aaaaaaaccaacggaatcccc

SEQ ID NO: 780 - DNA, 21 bp, Artificial Sequence
  n-mer motif encoding polynucleotide
gttaacgacaaccgaggaaac

SEQ ID NO: 781 - DNA, 21 bp, Artificial Sequence
  n-mer motif encoding polynucleotide
atgcacaccataacgggatcc

SEQ ID NO: 782 - DNA, 21 bp, Artificial Sequence
  n-mer motif encoding polynucleotide
attgatggtgttcagaagctt

SEQ ID NO: 783 - DNA, 21 bp, Artificial Sequence
  n-mer motif encoding polynucleotide
gcgcaggttaataatcatgat

SEQ ID NO: 784 - DNA, 21 bp, Artificial Sequence
  n-mer motif encoding polynucleotide
gtttcttcgcctaatggtacg

SEQ ID NO: 785 - DNA, 21 bp, Artificial Sequence
  n-mer motif encoding polynucleotide
gattctgctccgagggctatt

SEQ ID NO: 786 - DNA, 21 bp, Artificial Sequence
  n-mer motif encoding polynucleotide
tctgcgagtgatagtcagcat

SEQ ID NO: 787 - DNA, 21 bp, Artificial Sequence
  n-mer motif encoding polynucleotide
tcggctcatcagacgccgacg

SEQ ID NO: 788 - DNA, 21 bp, Artificial Sequence
  n-mer motif encoding polynucleotide
gcgacgctgaataatagttat

SEQ ID NO: 789 - DNA, 21 bp, Artificial Sequence
  n-mer motif encoding polynucleotide
gaagacagtatgagattctct

SEQ ID NO: 790 - DNA, 21 bp, Artificial Sequence
  n-mer motif encoding polynucleotide
gaacgaaacggactaatagaa

SEQ ID NO: 791 - DNA, 21 bp, Artificial Sequence
  n-mer motif encoding polynucleotide
ttagtacttgactcacggaac

SEQ ID NO: 792 - DNA, 21 bp, Artificial Sequence
  n-mer motif encoding polynucleotide
accgtcgaacaaataaactcg

SEQ ID NO: 793 - DNA, 21 bp, Artificial Sequence
  n-mer motif encoding polynucleotide
gggacaggtaccgttggatgg

SEQ ID NO: 794 - DNA, 21 bp, Artificial Sequence
  n-mer motif encoding polynucleotide
aatcagcagcgtattgataat

SEQ ID NO: 795 - DNA, 21 bp, Artificial Sequence
  n-mer motif encoding polynucleotide
atccaaaacggggtcctgcca

SEQ ID NO: 796 - DNA, 21 bp, Artificial Sequence
  n-mer motif encoding polynucleotide
ggagacatctcaagcagaaac

SEQ ID NO: 797 - DNA, 21 bp, Artificial Sequence
  n-mer motif encoding polynucleotide
gtcactggcactaccccggga

SEQ ID NO: 798 - DNA, 21 bp, Artificial Sequence
  n-mer motif encoding polynucleotide
acaagggaatcaatgtccatc

SEQ ID NO: 799 - DNA, 21 bp, Artificial Sequence
  n-mer motif encoding polynucleotide
cacacttactcacaagcagac

SEQ ID NO: 800 - DNA, 21 bp, Artificial Sequence
  n-mer motif encoding polynucleotide
tccaacatgggcgtagcctct

SEQ ID NO: 801 - DNA, 21 bp, Artificial Sequence
  n-mer motif encoding polynucleotide
cacgacttgaaccacggaaaa

SEQ ID NO: 802 - DNA, 21 bp, Artificial Sequence
  n-mer motif encoding polynucleotide
ctgtacgggggagcacaccaa

SEQ ID NO: 803 - DNA, 21 bp, Artificial Sequence
  n-mer motif encoding polynucleotide
aacgtgtacggagacggaata

SEQ ID NO: 804 - DNA, 21 bp, Artificial Sequence
  n-mer motif encoding polynucleotide
tctactattaatatgcgtgcg

SEQ ID NO: 805 - DNA, 21 bp, Artificial Sequence
  n-mer motif encoding polynucleotide
aagatggggagtattgaggtt

SEQ ID NO: 806 - DNA, 21 bp, Artificial Sequence
  n-mer motif encoding polynucleotide
tccgaaacgcgcgctggatac

SEQ ID NO: 807 - DNA, 21 bp, Artificial Sequence
  n-mer motif encoding polynucleotide
aatgtgggtaatactcttggg

SEQ ID NO: 808 - DNA, 21 bp, Artificial Sequence
  n-mer motif encoding polynucleotide
attggtgggactgatacgcgg

SEQ ID NO: 809 - DNA, 21 bp, Artificial Sequence
  n-mer motif encoding polynucleotide
gccgacaaaggattcggccac

SEQ ID NO: 810 - DNA, 21 bp, Artificial Sequence
  n-mer motif encoding polynucleotide
tggcaggatcataataaggtg

SEQ ID NO: 811 - DNA, 21 bp, Artificial Sequence
  n-mer motif encoding polynucleotide
aactacggttccggacgaatc

SEQ ID NO: 812 - DNA, 21 bp, Artificial Sequence
  n-mer motif encoding polynucleotide
actcataagcaggtggatctt

SEQ ID NO: 813 - DNA, 21 bp, Artificial Sequence
  n-mer motif encoding polynucleotide
cggcagaatgataagggtaat

SEQ ID NO: 814 - DNA, 21 bp, Artificial Sequence
  n-mer motif encoding polynucleotide
ggtaggaatgagagtccggag

SEQ ID NO: 815 - DNA, 21 bp, Artificial Sequence
  n-mer motif encoding polynucleotide
gtttttactgggcagacggag

SEQ ID NO: 816 - DNA, 21 bp, Artificial Sequence
  n-mer motif encoding polynucleotide
tatgttgatcgtaaggataat

SEQ ID NO: 817 - DNA, 21 bp, Artificial Sequence
  n-mer motif encoding polynucleotide
aataatactttgaatattttg

SEQ ID NO: 818 - DNA, 21 bp, Artificial Sequence
  n-mer motif encoding polynucleotide
ttgagctacagcatccaacac

SEQ ID NO: 819 - DNA, 21 bp, Artificial Sequence
  n-mer motif encoding polynucleotide
gctaccaacagatcgccccta

SEQ ID NO: 820 - DNA, 21 bp, Artificial Sequence
  n-mer motif encoding polynucleotide
gttcacaccgcagacacaata

SEQ ID NO: 821 - DNA, 21 bp, Artificial Sequence
  n-mer motif encoding polynucleotide
gggcatttggttaatatgtct

SEQ ID NO: 822 - DNA, 21 bp, Artificial Sequence
  n-mer motif encoding polynucleotide
ttagactacacccctcaaaac

SEQ ID NO: 823 - DNA, 21 bp, Artificial Sequence
  n-mer motif encoding polynucleotide
tccgcctcttactccaggatg

SEQ ID NO: 824 - DNA, 21 bp, Artificial Sequence
  n-mer motif encoding polynucleotide
tccggagcggcacaaaaccca

SEQ ID NO: 825 - DNA, 21 bp, Artificial Sequence
  n-mer motif encoding polynucleotide
agaaacacacttgctgacctt

SEQ ID NO: 826 - DNA, 21 bp, Artificial Sequence
  n-mer motif encoding polynucleotide
ggttctacggtgtcggcgcag

SEQ ID NO: 827 - DNA, 21 bp, Artificial Sequence
  n-mer motif encoding polynucleotide
tctaaggatagtactatgtat

SEQ ID NO: 828 - DNA, 21 bp, Artificial Sequence
  n-mer motif encoding polynucleotide
gtggtggttcacactatccca

SEQ ID NO: 829 - DNA, 21 bp, Artificial Sequence
  n-mer motif encoding polynucleotide
ccacgtactgtctcattggac

SEQ ID NO: 830 - DNA, 21 bp, Artificial Sequence
  n-mer motif encoding polynucleotide
atgatgaagagtgaggagaat

SEQ ID NO: 831 - DNA, 21 bp, Artificial Sequence
  n-mer motif encoding polynucleotide
accaccgaccggccaaacgga

SEQ ID NO: 832 - DNA, 21 bp, Artificial Sequence
  n-mer motif encoding polynucleotide
catagtcctcctacgactatg

SEQ ID NO: 833 - DNA, 21 bp, Artificial Sequence
  n-mer motif encoding polynucleotide
ggccaatggacaacagggaca

SEQ ID NO: 834 - DNA, 21 bp, Artificial Sequence
  n-mer motif encoding polynucleotide
gacggtatgaacggagtgggt

SEQ ID NO: 835 - DNA, 21 bp, Artificial Sequence
  n-mer motif encoding polynucleotide
cttcatactgttgcgaatgag

SEQ ID NO: 836 - DNA, 21 bp, Artificial Sequence
  n-mer motif encoding polynucleotide
tatacgtcgcagacgtctacg

SEQ ID NO: 837 - DNA, 21 bp, Artificial Sequence
  n-mer motif encoding polynucleotide
aacttctccgaaatgtccaca

SEQ ID NO: 838 - DNA, 21 bp, Artificial Sequence
  n-mer motif encoding polynucleotide
attaatattcgtagtgatttg

SEQ ID NO: 839 - DNA, 21 bp, Artificial Sequence
  n-mer motif encoding polynucleotide
ccctccaacagtgaaagattc

SEQ ID NO: 840 - DNA, 21 bp, Artificial Sequence
  n-mer motif encoding polynucleotide
tatacgaattatggggatctt

SEQ ID NO: 841 - DNA, 21 bp, Artificial Sequence
  n-mer motif encoding polynucleotide
gataagagtacggcgcaggcg

SEQ ID NO: 842 - DNA, 21 bp, Artificial Sequence
  n-mer motif encoding polynucleotide
cacaccgacatggtatcctct

SEQ ID NO: 843 - DNA, 21 bp, Artificial Sequence
  n-mer motif encoding polynucleotide
aacaaaagtctgtcaatggac

SEQ ID NO: 844 - DNA, 21 bp, Artificial Sequence
  n-mer motif encoding polynucleotide
gggcactacgctacaaacaca

SEQ ID NO: 845 - DNA, 21 bp, Artificial Sequence
  n-mer motif encoding polynucleotide
gtcatcgtatctacaaaatca

SEQ ID NO: 846 - DNA, 21 bp, Artificial Sequence
  n-mer motif encoding polynucleotide
actcatagtcttatgaatgat

SEQ ID NO: 847 - DNA, 21 bp, Artificial Sequence
  n-mer motif encoding polynucleotide
aactaccacggagacaacgtt

SEQ ID NO: 848 - DNA, 21 bp, Artificial Sequence
  n-mer motif encoding polynucleotide
cgtgatgatcagcagcttgat

SEQ ID NO: 849 - DNA, 21 bp, Artificial Sequence
  n-mer motif encoding polynucleotide
gatgataagactggtcggtat

SEQ ID NO: 850 - DNA, 21 bp, Artificial Sequence
  n-mer motif encoding polynucleotide
gggtcgagccaacaccacgaa

SEQ ID NO: 851 - DNA, 21 bp, Artificial Sequence
  n-mer motif encoding polynucleotide
cgtgttacaggtgtctcaaca

SEQ ID NO: 852 - DNA, 21 bp, Artificial Sequence
  n-mer motif encoding polynucleotide
agtactgcgtcggggcatact

SEQ ID NO: 853 - DNA, 21 bp, Artificial Sequence
  n-mer motif encoding polynucleotide
actaacaacctctcatacgaa

SEQ ID NO: 854 - DNA, 21 bp, Artificial Sequence
  n-mer motif encoding polynucleotide
cagcataatagtgcgtcggcg

SEQ ID NO: 855 - DNA, 21 bp, Artificial Sequence
  n-mer motif encoding polynucleotide
ccggctaagggttttggtcat

SEQ ID NO: 856 - DNA, 21 bp, Artificial Sequence
  n-mer motif encoding polynucleotide
tggtacgaaacaatcagcccg

SEQ ID NO: 857 - DNA, 21 bp, Artificial Sequence
  n-mer motif encoding polynucleotide
acggatgctacggggaggcat

SEQ ID NO: 858 - DNA, 21 bp, Artificial Sequence
  n-mer motif encoding polynucleotide
attcaggcgaagaattctgag

SEQ ID NO: 859 - DNA, 21 bp, Artificial Sequence
  n-mer motif encoding polynucleotide
agtactgagactaggggtggg

SEQ ID NO: 860 - DNA, 21 bp, Artificial Sequence
  n-mer motif encoding polynucleotide
ttctcaacaaactctgtaatc

SEQ ID NO: 861 - DNA, 21 bp, Artificial Sequence
  n-mer motif encoding polynucleotide
tctaaccttcgaaacacaata

SEQ ID NO: 862 - DNA, 21 bp, Artificial Sequence
  n-mer motif encoding polynucleotide
gggatgatcgggcacaacgca

SEQ ID NO: 863 - DNA, 21 bp, Artificial Sequence
  n-mer motif encoding polynucleotide
tctggccaaggattctcggca

SEQ ID NO: 864 - DNA, 21 bp, Artificial Sequence
  n-mer motif encoding polynucleotide
acccacaactctacaggcctt

SEQ ID NO: 865 - DNA, 21 bp, Artificial Sequence
  n-mer motif encoding polynucleotide
aggattgatagtgctatggtg

SEQ ID NO: 866 - DNA, 21 bp, Artificial Sequence
  n-mer motif encoding polynucleotide
gtcgctatgggaggcggtccc

SEQ ID NO: 867 - DNA, 21 bp, Artificial Sequence
  n-mer motif encoding polynucleotide
ggctctcacaacggcccagcc

SEQ ID NO: 868 - DNA, 21 bp, Artificial Sequence
  n-mer motif encoding polynucleotide
cactccgcagcgggtgacggt

SEQ ID NO: 869 - DNA, 21 bp, Artificial Sequence
  n-mer motif encoding polynucleotide
gcacaaggcataacccacgct

SEQ ID NO: 870 - DNA, 21 bp, Artificial Sequence
  n-mer motif encoding polynucleotide
tctgcgcttttgcggatggat

SEQ ID NO: 871 - DNA, 21 bp, Artificial Sequence
  n-mer motif encoding polynucleotide
tggcaaatgggggccgggagc

SEQ ID NO: 872 - DNA, 21 bp, Artificial Sequence
  n-mer motif encoding polynucleotide
atagactcgcacgccagcata

SEQ ID NO: 873 - DNA, 21 bp, Artificial Sequence
  n-mer motif encoding polynucleotide
agcctagaccacgcccctcta

SEQ ID NO: 874 - DNA, 21 bp, Artificial Sequence
  n-mer motif encoding polynucleotide
gaaaacaacatgcaacacggc

SEQ ID NO: 875 - DNA, 21 bp, Artificial Sequence
  n-mer motif encoding polynucleotide
aagggtgcgcagggtgttcag

SEQ ID NO: 876 - DNA, 21 bp, Artificial Sequence
  n-mer motif encoding polynucleotide
gtcgctgtatcgaacactcca

SEQ ID NO: 877 - DNA, 21 bp, Artificial Sequence
  n-mer motif encoding polynucleotide
gttgagtcttcttattctcgg

SEQ ID NO: 878 - DNA, 21 bp, Artificial Sequence
  n-mer motif encoding polynucleotide
cataatacggagtctaagact

SEQ ID NO: 879 - DNA, 21 bp, Artificial Sequence
  n-mer motif encoding polynucleotide
aatgagagtacgaaggagagt

SEQ ID NO: 880 - DNA, 21 bp, Artificial Sequence
  n-mer motif encoding polynucleotide
gatgtttatcttaagagtccg

SEQ ID NO: 881 - DNA, 21 bp, Artificial Sequence
  n-mer motif encoding polynucleotide
cagtcgggggctaggactctg

SEQ ID NO: 882 - DNA, 21 bp, Artificial Sequence
  n-mer motif encoding polynucleotide
tcgaacagtcaagtacacaac

SEQ ID NO: 883 - DNA, 21 bp, Artificial Sequence
  n-mer motif encoding polynucleotide
gtagtctcatcgggcggctgg

SEQ ID NO: 884 - DNA, 21 bp, Artificial Sequence
  n-mer motif encoding polynucleotide
ccatcaagtttcaacagcgcc

SEQ ID NO: 885 - DNA, 21 bp, Artificial Sequence
  n-mer motif encoding polynucleotide
aagcagactgatagtaggggt

SEQ ID NO: 886 - DNA, 21 bp, Artificial Sequence
  n-mer motif encoding polynucleotide
aacacaacgccacctaaccac

SEQ ID NO: 887 - DNA, 21 bp, Artificial Sequence
  n-mer motif encoding polynucleotide
caaaacggaacctcgtctata

SEQ ID NO: 888 - DNA, 21 bp, Artificial Sequence
  n-mer motif encoding polynucleotide
ctcatgaaagacatggaatcc

SEQ ID NO: 889 - DNA, 21 bp, Artificial Sequence
  n-mer motif encoding polynucleotide
actcagactggtcatgtttct

SEQ ID NO: 890 - DNA, 21 bp, Artificial Sequence
  n-mer motif encoding polynucleotide
gaaatacacacgaccacaggc

SEQ ID NO: 891 - DNA, 21 bp, Artificial Sequence
  n-mer motif encoding polynucleotide
atacaaactactacaaaatgc

SEQ ID NO: 892 - DNA, 21 bp, Artificial Sequence
  n-mer motif encoding polynucleotide
cccgctgaaggaaacaaccgt

SEQ ID NO: 893 - DNA, 21 bp, Artificial Sequence
  n-mer motif encoding polynucleotide
tacatcgccggaggggaacaa

SEQ ID NO: 894 - DNA, 21 bp, Artificial Sequence
  n-mer motif encoding polynucleotide
gaagtacgcgaccaaaaaaca

SEQ ID NO: 895 - DNA, 21 bp, Artificial Sequence
  n-mer motif encoding polynucleotide
tacgccgtcgcgataggcaca

SEQ ID NO: 896 - DNA, 21 bp, Artificial Sequence
  n-mer motif encoding polynucleotide
tccgctaacgaacacaaccac

SEQ ID NO: 897 - DNA, 21 bp, Artificial Sequence
  n-mer motif encoding polynucleotide
gggatgagggatacgccgccg

SEQ ID NO: 898 - DNA, 21 bp, Artificial Sequence
  n-mer motif encoding polynucleotide
gctcagcagattgttaatggg

SEQ ID NO: 899 - DNA, 21 bp, Artificial Sequence
  n-mer motif encoding polynucleotide
tcaagttcccaaacggttttg

SEQ ID NO: 900 - DNA, 21 bp, Artificial Sequence
  n-mer motif encoding polynucleotide
gttattcagtctgataatacg

SEQ ID NO: 901 - DNA, 21 bp, Artificial Sequence
  n-mer motif encoding polynucleotide
gttccggcgcattctcggggt

SEQ ID NO: 902 - DNA, 21 bp, Artificial Sequence
  n-mer motif encoding polynucleotide
tcgaatacggggtcgttgggt

SEQ ID NO: 903 - DNA, 21 bp, Artificial Sequence
  n-mer motif encoding polynucleotide
tgggccaaagacgtcaacgtc

SEQ ID NO: 904 - DNA, 21 bp, Artificial Sequence
  n-mer motif encoding polynucleotide
aatgtgttgggtgcttcgagt

SEQ ID NO: 905 - DNA, 21 bp, Artificial Sequence
  n-mer motif encoding polynucleotide
actccggaggctagtgcgcgt

SEQ ID NO: 906 - DNA, 21 bp, Artificial Sequence
  n-mer motif encoding polynucleotide
aattataatggggttaatgtg

SEQ ID NO: 907 - DNA, 21 bp, Artificial Sequence
  n-mer motif encoding polynucleotide
aacacaaccggtagctcgggc

SEQ ID NO: 908 - DNA, 21 bp, Artificial Sequence
  n-mer motif encoding polynucleotide
tccagcggccaaccgctcgtc

SEQ ID NO: 909 - DNA, 21 bp, Artificial Sequence
  n-mer motif encoding polynucleotide
caggcggggggtgtggcgagt

SEQ ID NO: 910 - DNA, 21 bp, Artificial Sequence
  n-mer motif encoding polynucleotide
ccgcttcaatcccaatcggga

SEQ ID NO: 911 - DNA, 21 bp, Artificial Sequence
  n-mer motif encoding polynucleotide
caacgtacctcggaagcgcca

SEQ ID NO: 912 - DNA, 21 bp, Artificial Sequence
  n-mer motif encoding polynucleotide
ttggctaagacggttgcgatt

SEQ ID NO: 913 - DNA, 21 bp, Artificial Sequence
  n-mer motif encoding polynucleotide
acccacacccttgggggaaca

SEQ ID NO: 914 - DNA, 21 bp, Artificial Sequence
  n-mer motif encoding polynucleotide
cacgactacagtatgaacgcg

SEQ ID NO: 915 - DNA, 21 bp, Artificial Sequence
  n-mer motif encoding polynucleotide
gggaaacctgcggaagcgccg

SEQ ID NO: 916 - DNA, 21 bp, Artificial Sequence
  n-mer motif encoding polynucleotide
agaaacgaaaacgtaaacgct

SEQ ID NO: 917 - DNA, 21 bp, Artificial Sequence
  n-mer motif encoding polynucleotide
agttctcgggaggcgaagttt

SEQ ID NO: 918 - DNA, 21 bp, Artificial Sequence
  n-mer motif encoding polynucleotide
tcttcttctgatagtccgcgt

SEQ ID NO: 919 - DNA, 21 bp, Artificial Sequence
  n-mer motif encoding polynucleotide
atgaatacgacttataatgag

SEQ ID NO: 920 - DNA, 21 bp, Artificial Sequence
  n-mer motif encoding polynucleotide
gtaaggagtggaataaaacca

SEQ ID NO: 921 - DNA, 21 bp, Artificial Sequence
  n-mer motif encoding polynucleotide
caggagaatcctatgaagatg

SEQ ID NO: 922 - DNA, 21 bp, Artificial Sequence
  n-mer motif encoding polynucleotide
actgagccgcttccgatgtct

SEQ ID NO: 923 - DNA, 21 bp, Artificial Sequence
  n-mer motif encoding polynucleotide
cgccacggggacacaccgatg

SEQ ID NO: 924 - DNA, 21 bp, Artificial Sequence
  n-mer motif encoding polynucleotide
gcggtgaatacgtataatagt

SEQ ID NO: 925 - DNA, 21 bp, Artificial Sequence
  n-mer motif encoding polynucleotide
gcgtcgactgagtctcatgtg

SEQ ID NO: 926 - DNA, 21 bp, Artificial Sequence
  n-mer motif encoding polynucleotide
acaaacctaagtcaatcggcc

SEQ ID NO: 927 - DNA, 21 bp, Artificial Sequence
  n-mer motif encoding polynucleotide
gagctgtctactcctatggtt

SEQ ID NO: 928 - DNA, 21 bp, Artificial Sequence
  n-mer motif encoding polynucleotide
tatgcgcatcctgtgactcat

SEQ ID NO: 929 - DNA, 21 bp, Artificial Sequence
  n-mer motif encoding polynucleotide
cgggggtctactggtacgcag

SEQ ID NO: 930 - DNA, 21 bp, Artificial Sequence
  n-mer motif encoding polynucleotide
tgtgttggttcgtgtggtgtg

SEQ ID NO: 931 - DNA, 21 bp, Artificial Sequence
  n-mer motif encoding polynucleotide
tcggttgctaaggatcagacg

SEQ ID NO: 932 - DNA, 21 bp, Artificial Sequence
  n-mer motif encoding polynucleotide
acgaatctttctcctaagacg

SEQ ID NO: 933 - DNA, 21 bp, Artificial Sequence
  n-mer motif encoding polynucleotide
ctaggtttcacaccccaaccg

SEQ ID NO: 934 - DNA, 21 bp, Artificial Sequence
  n-mer motif encoding polynucleotide
aatattagtagtattaatcag

SEQ ID NO: 935 - DNA, 21 bp, Artificial Sequence
  n-mer motif encoding polynucleotide
gtttacgacaacgtttcttct

SEQ ID NO: 936 - DNA, 21 bp, Artificial Sequence
  n-mer motif encoding polynucleotide
agtggaaaacaagacaaatac

SEQ ID NO: 937 - DNA, 21 bp, Artificial Sequence
  n-mer motif encoding polynucleotide
agacttacagaactggtcata

SEQ ID NO: 938 - DNA, 21 bp, Artificial Sequence
  n-mer motif encoding polynucleotide
cataagagtgagagtcataat

SEQ ID NO: 939 - DNA, 21 bp, Artificial Sequence
  n-mer motif encoding polynucleotide
gaggcgactcatggttcttat

SEQ ID NO: 940 - DNA, 21 bp, Artificial Sequence
  n-mer motif encoding polynucleotide
aacctacttgtcgaccaacgt

SEQ ID NO: 941 - DNA, 21 bp, Artificial Sequence
  n-mer motif encoding polynucleotide
aatattaatgatactaagaat

SEQ ID NO: 942 - DNA, 21 bp, Artificial Sequence
  n-mer motif encoding polynucleotide
cttgcggttacgaatgtgcgg

SEQ ID NO: 943 - DNA, 21 bp, Artificial Sequence
  n-mer motif encoding polynucleotide
ccgtcgacactcgctgaaaca

SEQ ID NO: 944 - DNA, 21 bp, Artificial Sequence
  n-mer motif encoding polynucleotide
ccgaagcctgggacgggggag

SEQ ID NO: 945 - DNA, 21 bp, Artificial Sequence
  n-mer motif encoding polynucleotide
gtgctgttgcagaattctcat

SEQ ID NO: 946 - DNA, 21 bp, Artificial Sequence
  n-mer motif encoding polynucleotide
tacggtaacgcgaacaccgta

SEQ ID NO: 947 - DNA, 21 bp, Artificial Sequence
  n-mer motif encoding polynucleotide
acatctggagttctgacacgc

SEQ ID NO: 948 - DNA, 21 bp, Artificial Sequence
  n-mer motif encoding polynucleotide
aaaataacggaaaccaacctc

SEQ ID NO: 949 - DNA, 21 bp, Artificial Sequence
  n-mer motif encoding polynucleotide
gttcgcagagacgaaacacct

SEQ ID NO: 950 - DNA, 21 bp, Artificial Sequence
  n-mer motif encoding polynucleotide
tctaaaatgtcaaacccagtg

SEQ ID NO: 951 - DNA, 21 bp, Artificial Sequence
  n-mer motif encoding polynucleotide
tgggaatccctctccaacgca

SEQ ID NO: 952 - DNA, 21 bp, Artificial Sequence
  n-mer motif encoding polynucleotide
gccaacggaggaggatacccc

SEQ ID NO: 953 - DNA, 21 bp, Artificial Sequence
  n-mer motif encoding polynucleotide
atgttggcttctcgggtgcct

SEQ ID NO: 954 - DNA, 21 bp, Artificial Sequence
  n-mer motif encoding polynucleotide
tgcggcctgaactgcggtaaa

SEQ ID NO: 955 - DNA, 21 bp, Artificial Sequence
  n-mer motif encoding polynucleotide
actattactagtccgtcggtg

SEQ ID NO: 956 - DNA, 21 bp, Artificial Sequence
  n-mer motif encoding polynucleotide
tggtcgaatgctcagagtccg

SEQ ID NO: 957 - DNA, 21 bp, Artificial Sequence
  n-mer motif encoding polynucleotide
acagaaagccccaaactacta

SEQ ID NO: 958 - DNA, 21 bp, Artificial Sequence
  n-mer motif encoding polynucleotide
catttggttactagtggtatt

SEQ ID NO: 959 - DNA, 21 bp, Artificial Sequence
  n-mer motif encoding polynucleotide
cctcctaagtcggattcgaat

SEQ ID NO: 960 - DNA, 21 bp, Artificial Sequence
  n-mer motif encoding polynucleotide
attgcggtgcatgtgctgagt

SEQ ID NO: 961 - DNA, 21 bp, Artificial Sequence
  n-mer motif encoding polynucleotide
actggtactgcgactttgcct

SEQ ID NO: 962 - DNA, 21 bp, Artificial Sequence
  n-mer motif encoding polynucleotide
aatactactccgcctaatcat

SEQ ID NO: 963 - DNA, 21 bp, Artificial Sequence
  n-mer motif encoding polynucleotide
tgcaccgccacaaaatgctca

SEQ ID NO: 964 - DNA, 21 bp, Artificial Sequence
  n-mer motif encoding polynucleotide
cacagtgacatggtcagcggc

SEQ ID NO: 965 - DNA, 21 bp, Artificial Sequence
  n-mer motif encoding polynucleotide
ccaaacgcacaccacctgccc

SEQ ID NO: 966 - DNA, 21 bp, Artificial Sequence
  n-mer motif encoding polynucleotide
tctaataatatgaatcaggcg

SEQ ID NO: 967 - DNA, 21 bp, Artificial Sequence
  n-mer motif encoding polynucleotide
agtgataataatagggctaat

SEQ ID NO: 968 - DNA, 21 bp, Artificial Sequence
  n-mer motif encoding polynucleotide
ttgcagacgcctgggacgacg

SEQ ID NO: 969 - DNA, 21 bp, Artificial Sequence
  n-mer motif encoding polynucleotide
gtgcgcggcgttcaagacgcc

SEQ ID NO: 970 - DNA, 21 bp, Artificial Sequence
  n-mer motif encoding polynucleotide
tctctagactcgcgctcctcg

SEQ ID NO: 971 - DNA, 21 bp, Artificial Sequence
  n-mer motif encoding polynucleotide
gtttgtgttactacttgtgct

SEQ ID NO: 972 - DNA, 21 bp, Artificial Sequence
  n-mer motif encoding polynucleotide
ccgaatactaatcatcttgtg

SEQ ID NO: 973 - DNA, 21 bp, Artificial Sequence
  n-mer motif encoding polynucleotide
ctcatgtcagggaaagaaaac

SEQ ID NO: 974 - DNA, 21 bp, Artificial Sequence
  n-mer motif encoding polynucleotide
acttctgctagtgagaattgg

SEQ ID NO: 975 - DNA, 21 bp, Artificial Sequence
  n-mer motif encoding polynucleotide
tttttgccgcagctggggcag

SEQ ID NO: 976 - DNA, 21 bp, Artificial Sequence
  n-mer motif encoding polynucleotide
ccttttaatcctgggaatgtg

SEQ ID NO: 977 - DNA, 21 bp, Artificial Sequence
  n-mer motif encoding polynucleotide
gggacacctggtcaaagtata

SEQ ID NO: 978 - DNA, 21 bp, Artificial Sequence
  n-mer motif encoding polynucleotide
tataataatggtgggcatgtt

SEQ ID NO: 979 - DNA, 21 bp, Artificial Sequence
  n-mer motif encoding polynucleotide
ctcggaaaccactacacaccc

SEQ ID NO: 980 - DNA, 21 bp, Artificial Sequence
  n-mer motif encoding polynucleotide
caagtcaaccaaccgagaata

SEQ ID NO: 981 - DNA, 21 bp, Artificial Sequence
  n-mer motif encoding polynucleotide
ttaggaaacaaccggccacta

SEQ ID NO: 982 - DNA, 21 bp, Artificial Sequence
  n-mer motif encoding polynucleotide
cctccggaaagtgccaggggc

SEQ ID NO: 983 - DNA, 21 bp, Artificial Sequence
  n-mer motif encoding polynucleotide
aaatctgtaggcgacgggaga

SEQ ID NO: 984 - DNA, 21 bp, Artificial Sequence
  n-mer motif encoding polynucleotide
tcacttcggacggacgaattc

SEQ ID NO: 985 - DNA, 21 bp, Artificial Sequence
  n-mer motif encoding polynucleotide
agtactactaatgttgcgtat

SEQ ID NO: 986 - DNA, 21 bp, Artificial Sequence
  n-mer motif encoding polynucleotide
aggatgtcggatcctagtgat

SEQ ID NO: 987 - DNA, 21 bp, Artificial Sequence
  n-mer motif encoding polynucleotide
agtctgtctattacttcggcg

SEQ ID NO: 988 - DNA, 21 bp, Artificial Sequence
  n-mer motif encoding polynucleotide
gaaagtgccacatctctaaaa

SEQ ID NO: 989 - DNA, 21 bp, Artificial Sequence
  n-mer motif encoding polynucleotide
tacactgacggaagaaacacc

SEQ ID NO: 990 - DNA, 21 bp, Artificial Sequence
  n-mer motif encoding polynucleotide
tccatatccaacctgcgtacc

SEQ ID NO: 991 - DNA, 21 bp, Artificial Sequence
  n-mer motif encoding polynucleotide
caaaacgacaaatctgacaac

SEQ ID NO: 992 - DNA, 21 bp, Artificial Sequence
  n-mer motif encoding polynucleotide
ggtggaacaggtctttccaaa

SEQ ID NO: 993 - DNA, 21 bp, Artificial Sequence
  n-mer motif encoding polynucleotide
agtcaggctcagattcgtgtt

SEQ ID NO: 994 - DNA, 21 bp, Artificial Sequence
  n-mer motif encoding polynucleotide
ggtttgatggcgcatgtgact

SEQ ID NO: 995 - DNA, 21 bp, Artificial Sequence
  n-mer motif encoding polynucleotide
ctggttgtttcgaatagtctg

SEQ ID NO: 996 - DNA, 21 bp, Artificial Sequence
  n-mer motif encoding polynucleotide
catgattctgtgaatacggcg

SEQ ID NO: 997 - DNA, 21 bp, Artificial Sequence
  n-mer motif encoding polynucleotide
actcttgcgaaggatgggaat

SEQ ID NO: 998 - DNA, 21 bp, Artificial Sequence
  n-mer motif encoding polynucleotide
tccgacggatcgaaactacta

SEQ ID NO: 999 - DNA, 21 bp, Artificial Sequence
  n-mer motif encoding polynucleotide
atagacaaaacgttctcggtc

SEQ ID NO: 1000 - DNA, 21 bp, Artificial Sequence
  n-mer motif encoding polynucleotide
cggctggttaacatcgaccac

SEQ ID NO: 1001 - DNA, 21 bp, Artificial Sequence
  n-mer motif encoding polynucleotide
aaaaactacgacagtgactca

SEQ ID NO: 1002 - DNA, 21 bp, Artificial Sequence
  n-mer motif encoding polynucleotide
agtacgcagagtactaatccg

SEQ ID NO: 1003 - DNA, 21 bp, Artificial Sequence
  n-mer motif encoding polynucleotide
caaatatcactacaactcggc

SEQ ID NO: 1004 - DNA, 21 bp, Artificial Sequence
  n-mer motif encoding polynucleotide
tccgaaccccttagagttgga

SEQ ID NO: 1005 - DNA, 21 bp, Artificial Sequence
  n-mer motif encoding polynucleotide
agtcgtctgcagactcagcag

SEQ ID NO: 1006 - DNA, 21 bp, Artificial Sequence
  n-mer motif encoding polynucleotide
gaaggttcacaaggaaaccac

SEQ ID NO: 1007 - DNA, 21 bp, Artificial Sequence
  n-mer motif encoding polynucleotide
cgttctgaccttactgaaagt

SEQ ID NO: 1008 - DNA, 21 bp, Artificial Sequence
  n-mer motif encoding polynucleotide
catactggtgttcagactaat

SEQ ID NO: 1009 - DNA, 21 bp, Artificial Sequence
  n-mer motif encoding polynucleotide
gagttggatcatctttcgcat

SEQ ID NO: 1010 - DNA, 21 bp, Artificial Sequence
  n-mer motif encoding polynucleotide
gttactggtgttgattatgcg

SEQ ID NO: 1011 - DNA, 21 bp, Artificial Sequence
  n-mer motif encoding polynucleotide
ggcggcgcacacactcgtgta

SEQ ID NO: 1012 - DNA, 21 bp, Artificial Sequence
  n-mer motif encoding polynucleotide
gcctacggtatacacgaagtg

SEQ ID NO: 1013 - DNA, 21 bp, Artificial Sequence
  n-mer motif encoding polynucleotide
gcgatgctgcgtatggagcag

SEQ ID NO: 1014 - DNA, 21 bp, Artificial Sequence
  n-mer motif encoding polynucleotide
aggcaggcgaatcagacgtat

SEQ ID NO: 1015 - DNA, 21 bp, Artificial Sequence
  n-mer motif encoding polynucleotide
ttttctggtcaggcgttggct

SEQ ID NO: 1016 - DNA, 21 bp, Artificial Sequence
  n-mer motif encoding polynucleotide
gataatgtgaattctcagcct

SEQ ID NO: 1017 - DNA, 21 bp, Artificial Sequence
  n-mer motif encoding polynucleotide
gggttgcatgggacgagtaat

SEQ ID NO: 1018 - DNA, 21 bp, Artificial Sequence
  n-mer motif encoding polynucleotide
gagagggagcctcctaagaat

SEQ ID NO: 1019 - DNA, 21 bp, Artificial Sequence
  n-mer motif encoding polynucleotide
gtggtgacgcttgggatgctg

SEQ ID NO: 1020 - DNA, 21 bp, Artificial Sequence
  n-mer motif encoding polynucleotide
cataataataatttgctgaat

SEQ ID NO: 1021 - DNA, 21 bp, Artificial Sequence
  n-mer motif encoding polynucleotide
ttgattaatatgagtcagaat

SEQ ID NO: 1022 - DNA, 21 bp, Artificial Sequence
  n-mer motif encoding polynucleotide
aatactaatgcgtcgtattct

SEQ ID NO: 1023 - DNA, 21 bp, Artificial Sequence
  n-mer motif encoding polynucleotide
aggcttaatgcgggtgagcat

SEQ ID NO: 1024 - DNA, 21 bp, Artificial Sequence
  n-mer motif encoding polynucleotide
gctgttattctgaatcctgtt

SEQ ID NO: 1025 - DNA, 21 bp, Artificial Sequence
  n-mer motif encoding polynucleotide
ccgagtactcatgggtatgtt

SEQ ID NO: 1026 - DNA, 21 bp, Artificial Sequence
  n-mer motif encoding polynucleotide
cttagggcgtctgtgtcggag

SEQ ID NO: 1027 - DNA, 21 bp, Artificial Sequence
  n-mer motif encoding polynucleotide
atgatgacctctatgacgtta

SEQ ID NO: 1028 - DNA, 21 bp, Artificial Sequence
  n-mer motif encoding polynucleotide
tcggcacacaacatagtatac

SEQ ID NO: 1029 - DNA, 21 bp, Artificial Sequence
  n-mer motif encoding polynucleotide
cacgacagcacaacccgccca

SEQ ID NO: 1030 - DNA, 21 bp, Artificial Sequence
  n-mer motif encoding polynucleotide
atcaaagactcgtaccttact

SEQ ID NO: 1031 - DNA, 21 bp, Artificial Sequence
  n-mer motif encoding polynucleotide
tatacgcctgggcttactgag

SEQ ID NO: 1032 - DNA, 21 bp, Artificial Sequence
  n-mer motif encoding polynucleotide
aagatgggtggttctcagagt

SEQ ID NO: 1033 - DNA, 21 bp, Artificial Sequence
  n-mer motif encoding polynucleotide
tcacgtcaaacagcgctaaca

SEQ ID NO: 1034 - DNA, 21 bp, Artificial Sequence
  n-mer motif encoding polynucleotide
gtagaaaccagcagattgtac

SEQ ID NO: 1035 - DNA, 21 bp, Artificial Sequence
  n-mer motif encoding polynucleotide
aaatccaacaacggggaatac

SEQ ID NO: 1036 - DNA, 21 bp, Artificial Sequence
  n-mer motif encoding polynucleotide
tcgggtgttcatagtgcgcgt

SEQ ID NO: 1037 - DNA, 21 bp, Artificial Sequence
  n-mer motif encoding polynucleotide
cctaacaacgaaaaaaacccg

SEQ ID NO: 1038 - DNA, 21 bp, Artificial Sequence
  n-mer motif encoding polynucleotide
actattggtgaggggtatcat

SEQ ID NO: 1039 - DNA, 21 bp, Artificial Sequence
  n-mer motif encoding polynucleotide
ctgcagacttctgttgctact

SEQ ID NO: 1040 - DNA, 21 bp, Artificial Sequence
  n-mer motif encoding polynucleotide
ctattgggaaacgcacccaca

SEQ ID NO: 1041 - DNA, 21 bp, Artificial Sequence
  n-mer motif encoding polynucleotide
atttcggggtctcatttgaat

SEQ ID NO: 1042 - DNA, 21 bp, Artificial Sequence
  n-mer motif encoding polynucleotide
aagtctcttagtagtgatgat

SEQ ID NO: 1043 - DNA, 21 bp, Artificial Sequence
  n-mer motif encoding polynucleotide
acgaggactcaggggacgtct

SEQ ID NO: 1044 - DNA, 21 bp, Artificial Sequence
  n-mer motif encoding polynucleotide
gttagtaggtctgggagtact

SEQ ID NO: 1045 - DNA, 21 bp, Artificial Sequence
  n-mer motif encoding polynucleotide
agcgccgacacccggtccccc

SEQ ID NO: 1046 - DNA, 21 bp, Artificial Sequence
  n-mer motif encoding polynucleotide
cgtgatactgctaatgggccg

SEQ ID NO: 1047 - DNA, 21 bp, Artificial Sequence
  n-mer motif encoding polynucleotide
atgatgtctaacagcctcgcg

SEQ ID NO: 1048 - DNA, 21 bp, Artificial Sequence
  n-mer motif encoding polynucleotide
actgggaggattgagcttagg

SEQ ID NO: 1049 - DNA, 21 bp, Artificial Sequence
  n-mer motif encoding polynucleotide
gctaataatgcggctgcgtcg

SEQ ID NO: 1050 - DNA, 21 bp, Artificial Sequence
  n-mer motif encoding polynucleotide
cagttgaatattaatgataag

SEQ ID NO: 1051 - DNA, 21 bp, Artificial Sequence
  n-mer motif encoding polynucleotide
atggacggggctcacacgtca

SEQ ID NO: 1052 - DNA, 21 bp, Artificial Sequence
  n-mer motif encoding polynucleotide
actagtgcgactgattcgatg

SEQ ID NO: 1053 - DNA, 21 bp, Artificial Sequence
  n-mer motif encoding polynucleotide
gccgccagcttgtcgcaaagc

SEQ ID NO: 1054 - DNA, 21 bp, Artificial Sequence
  n-mer motif encoding polynucleotide
tctcaggcgggtctgcttgtg

SEQ ID NO: 1055 - DNA, 21 bp, Artificial Sequence
  n-mer motif encoding polynucleotide
acgacttattcggatctgagt

SEQ ID NO: 1056 - DNA, 21 bp, Artificial Sequence
  n-mer motif encoding polynucleotide
ttctcctccggaacaaccata

SEQ ID NO: 1057 - DNA, 21 bp, Artificial Sequence
  n-mer motif encoding polynucleotide
gtcttcacagaaatagaatcg

SEQ ID NO: 1058 - DNA, 21 bp, Artificial Sequence
  n-mer motif encoding polynucleotide
gcagaccccgctaaaggcaaa

SEQ ID NO: 1059 - DNA, 21 bp, Artificial Sequence
  n-mer motif encoding polynucleotide
aaagaatctgaatacagagtt

SEQ ID NO: 1060 - DNA, 21 bp, Artificial Sequence
  n-mer motif encoding polynucleotide
gggatggtgtctcttaatagg

SEQ ID NO: 1061 - DNA, 21 bp, Artificial Sequence
  n-mer motif encoding polynucleotide
accgttatcgaacgcaaagac

SEQ ID NO: 1062 - DNA, 21 bp, Artificial Sequence
  n-mer motif encoding polynucleotide
aggattgatacgttgttggtg

SEQ ID NO: 1063 - DNA, 21 bp, Artificial Sequence
  n-mer motif encoding polynucleotide
ggatccacaggcctacccccg

SEQ ID NO: 1064 - DNA, 21 bp, Artificial Sequence
  n-mer motif encoding polynucleotide
atggagttgacttctactagt

SEQ ID NO: 1065 - DNA, 21 bp, Artificial Sequence
  n-mer motif encoding polynucleotide
caaccaggagccccccaaacc

SEQ ID NO: 1066 - DNA, 21 bp, Artificial Sequence
  n-mer motif encoding polynucleotide
aattcgatgggtaatgggggt

SEQ ID NO: 1067 - DNA, 21 bp, Artificial Sequence
  n-mer motif encoding polynucleotide
ggtagtactaagtctgggcag

SEQ ID NO: 1068 - DNA, 21 bp, Artificial Sequence
  n-mer motif encoding polynucleotide
acttttttgcctcagcttggg

SEQ ID NO: 1069 - DNA, 21 bp, Artificial Sequence
  n-mer motif encoding polynucleotide
atgggaataaacgtactgagc

SEQ ID NO: 1070 - DNA, 21 bp, Artificial Sequence
  n-mer motif encoding polynucleotide
gtgaatcttggtatttcgggg

SEQ ID NO: 1071 - DNA, 21 bp, Artificial Sequence
  n-mer motif encoding polynucleotide
agtgagaatcgggctggtaat

SEQ ID NO: 1072 - DNA, 21 bp, Artificial Sequence
  n-mer motif encoding polynucleotide
cactccaacgcgactacgata

SEQ ID NO: 1073 - DNA, 21 bp, Artificial Sequence
  n-mer motif encoding polynucleotide
ccggggtcgtccgcttccatc

SEQ ID NO: 1074 - DNA, 21 bp, Artificial Sequence
  n-mer motif encoding polynucleotide
attacgtcgttgaatgggatg

SEQ ID NO: 1075 - DNA, 21 bp, Artificial Sequence
  n-mer motif encoding polynucleotide
tatctggagggtgctcatcgt

SEQ ID NO: 1076 - DNA, 21 bp, Artificial Sequence
  n-mer motif encoding polynucleotide
aggcaggttgagcagtctgat

SEQ ID NO: 1077 - DNA, 21 bp, Artificial Sequence
  n-mer motif encoding polynucleotide
agctctcaaagttccgggtcg

SEQ ID NO: 1078 - DNA, 21 bp, Artificial Sequence
  n-mer motif encoding polynucleotide
cagcttactgttgggaagccg

SEQ ID NO: 1079 - DNA, 21 bp, Artificial Sequence
  n-mer motif encoding polynucleotide
gttgtgcattcgagtattact

SEQ ID NO: 1080 - DNA, 21 bp, Artificial Sequence
  n-mer motif encoding polynucleotide
ctagaacaactacgggtccca

SEQ ID NO: 1081 - DNA, 21 bp, Artificial Sequence
  n-mer motif encoding polynucleotide
cagcattctccgaagccggtt

SEQ ID NO: 1082 - DNA, 21 bp, Artificial Sequence
  n-mer motif encoding polynucleotide
gcgggcagttcgccatcacgc

SEQ ID NO: 1083 - DNA, 21 bp, Artificial Sequence
  n-mer motif encoding polynucleotide
ggagtaacaatcggtagcagg

SEQ ID NO: 1084 - DNA, 21 bp, Artificial Sequence
  n-mer motif encoding polynucleotide
tacatcgcgggaggcgaccaa

SEQ ID NO: 1085 - DNA, 21 bp, Artificial Sequence
  n-mer motif encoding polynucleotide
attagtagtgagaggttttct

SEQ ID NO: 1086 - DNA, 21 bp, Artificial Sequence
  n-mer motif encoding polynucleotide
aggagtgagggtaatcatgct

SEQ ID NO: 1087 - DNA, 21 bp, Artificial Sequence
  n-mer motif encoding polynucleotide
gagaaggggaatagtggggtt

SEQ ID NO: 1088 - DNA, 21 bp, Artificial Sequence
  n-mer motif encoding polynucleotide
tacatagttgaccacgctaac

SEQ ID NO: 1089 - DNA, 21 bp, Artificial Sequence
  n-mer motif encoding polynucleotide
cgtcggttgagtacggatctt

SEQ ID NO: 1090 - DNA, 21 bp, Artificial Sequence
  n-mer motif encoding polynucleotide
gcgaatagtaggcttggggcg

SEQ ID NO: 1091 - DNA, 21 bp, Artificial Sequence
  n-mer motif encoding polynucleotide
ggtactgctgagaatacgagt

SEQ ID NO: 1092 - DNA, 21 bp, Artificial Sequence
  n-mer motif encoding polynucleotide
gtgagggatgttgctaaggag

SEQ ID NO: 1093 - DNA, 21 bp, Artificial Sequence
  n-mer motif encoding polynucleotide
ggaggccttaccaacggtcta

SEQ ID NO: 1094 - DNA, 21 bp, Artificial Sequence
  n-mer motif encoding polynucleotide
ccttcgattccgtcgttttcg

SEQ ID NO: 1095 - DNA, 21 bp, Artificial Sequence
  n-mer motif encoding polynucleotide
aacgctctcctcaacgcacct

SEQ ID NO: 1096 - DNA, 21 bp, Artificial Sequence
  n-mer motif encoding polynucleotide
gacgacatggtcaaaaactca

SEQ ID NO: 1097 - DNA, 21 bp, Artificial Sequence
  n-mer motif encoding polynucleotide
actgcgaatacgcatgctctg

SEQ ID NO: 1098 - DNA, 21 bp, Artificial Sequence
  n-mer motif encoding polynucleotide
gtatacgccaccgcactcgca

SEQ ID NO: 1099 - DNA, 21 bp, Artificial Sequence
  n-mer motif encoding polynucleotide
ggtatatacccggcatccacc

SEQ ID NO: 1100 - DNA, 21 bp, Artificial Sequence
  n-mer motif encoding polynucleotide
ggttttgatggtaagcagctt

SEQ ID NO: 1101 - DNA, 21 bp, Artificial Sequence
  n-mer motif encoding polynucleotide
cactctatgtccgcaaacacc

SEQ ID NO: 1102 - DNA, 21 bp, Artificial Sequence
  n-mer motif encoding polynucleotide
tggagcatcaaaaaccaaaca

SEQ ID NO: 1103 - DNA, 21 bp, Artificial Sequence
  n-mer motif encoding polynucleotide
accctccacaccaaagaccta

SEQ ID NO: 1104 - DNA, 21 bp, Artificial Sequence
  n-mer motif encoding polynucleotide
tcttatggtaatactcatgat

SEQ ID NO: 1105 - DNA, 21 bp, Artificial Sequence
  n-mer motif encoding polynucleotide
cagtcggggtctctggtgccg

SEQ ID NO: 1106 - DNA, 21 bp, Artificial Sequence
  n-mer motif encoding polynucleotide
aatactttgcagaatagtcat

SEQ ID NO: 1107 - DNA, 21 bp, Artificial Sequence
  n-mer motif encoding polynucleotide
acggctgagtctagtcatccg

SEQ ID NO: 1108 - DNA, 21 bp, Artificial Sequence
  n-mer motif encoding polynucleotide
gcctctacagtctcactctac

SEQ ID NO: 1109 - DNA, 21 bp, Artificial Sequence
  n-mer motif encoding polynucleotide
ctgactgctgttgcgattagt

SEQ ID NO: 1110 - DNA, 21 bp, Artificial Sequence
  n-mer motif encoding polynucleotide
gtctcgggacaaagtgcgtac

SEQ ID NO: 1111 - DNA, 21 bp, Artificial Sequence
  n-mer motif encoding polynucleotide
ggtgaaactaacttcccaact

SEQ ID NO: 1112 - DNA, 21 bp, Artificial Sequence
  n-mer motif encoding polynucleotide
aatgataataggtcgatgaat

SEQ ID NO: 1113 - DNA, 21 bp, Artificial Sequence
  n-mer motif encoding polynucleotide
cgatcaggcgaccctaaaaac

SEQ ID NO: 1114 - DNA, 21 bp, Artificial Sequence
  n-mer motif encoding polynucleotide
tgggagagtgataagtttcgt

SEQ ID NO: 1115 - DNA, 21 bp, Artificial Sequence
  n-mer motif encoding polynucleotide
caggttaatcataatactagt

SEQ ID NO: 1116 - DNA, 21 bp, Artificial Sequence
  n-mer motif encoding polynucleotide
gggtggtcgaacaacgaacta

SEQ ID NO: 1117 - DNA, 21 bp, Artificial Sequence
  n-mer motif encoding polynucleotide
cgggctgtgcttgcgactaat

SEQ ID NO: 1118 - DNA, 21 bp, Artificial Sequence
  n-mer motif encoding polynucleotide
catatgggtttgaatgagctt

SEQ ID NO: 1119 - DNA, 21 bp, Artificial Sequence
  n-mer motif encoding polynucleotide
ggagaaagctcctcaataagc

SEQ ID NO: 1120 - DNA, 21 bp, Artificial Sequence
  n-mer motif encoding polynucleotide
atacacaaatctagcgtcgaa

SEQ ID NO: 1121 - DNA, 21 bp, Artificial Sequence
  n-mer motif encoding polynucleotide
atgtccggatccatgatatca

SEQ ID NO: 1122 - DNA, 21 bp, Artificial Sequence
  n-mer motif encoding polynucleotide
ttgagtctggctgggaatagg

SEQ ID NO: 1123 - DNA, 21 bp, Artificial Sequence
  n-mer motif encoding polynucleotide
tctgcaacaacgaaccacgga

SEQ ID NO: 1124 - DNA, 21 bp, Artificial Sequence
  n-mer motif encoding polynucleotide
tctacggagtctaatgctagt

SEQ ID NO: 1125 - DNA, 21 bp, Artificial Sequence
  n-mer motif encoding polynucleotide
ccgattgctgagaggccttct

SEQ ID NO: 1126 - DNA, 21 bp, Artificial Sequence
  n-mer motif encoding polynucleotide
ttacttccaaacaacacccac

SEQ ID NO: 1127 - DNA, 21 bp, Artificial Sequence
  n-mer motif encoding polynucleotide
gggactcttaagaaggatgcg

SEQ ID NO: 1128 - DNA, 21 bp, Artificial Sequence
  n-mer motif encoding polynucleotide
gctcttgagaatcggagtctg

SEQ ID NO: 1129 - DNA, 21 bp, Artificial Sequence
  n-mer motif encoding polynucleotide
accaccgggaactccacgatg

SEQ ID NO: 1130 - DNA, 21 bp, Artificial Sequence
  n-mer motif encoding polynucleotide
gtgtatgatagtgcgcctaat

SEQ ID NO: 1131 - DNA, 21 bp, Artificial Sequence
  n-mer motif encoding polynucleotide
ctactatctaaaggggactcc

SEQ ID NO: 1132 - DNA, 21 bp, Artificial Sequence
  n-mer motif encoding polynucleotide
tcttacgccataaaccaatca

SEQ ID NO: 1133 - DNA, 21 bp, Artificial Sequence
  n-mer motif encoding polynucleotide
ggaggaggggaacgttccacg

SEQ ID NO: 1134 - DNA, 21 bp, Artificial Sequence
  n-mer motif encoding polynucleotide
attcaggttagtggtagtcag

SEQ ID NO: 1135 - DNA, 21 bp, Artificial Sequence
  n-mer motif encoding polynucleotide
tatcctgtttcgctttcgccg

SEQ ID NO: 1136 - DNA, 21 bp, Artificial Sequence
  n-mer motif encoding polynucleotide
gagttgggtaataagacggct

SEQ ID NO: 1137 - DNA, 21 bp, Artificial Sequence
  n-mer motif encoding polynucleotide
tcgggggtaaacttcggagta

SEQ ID NO: 1138 - DNA, 21 bp, Artificial Sequence
  n-mer motif encoding polynucleotide
gcgtggagttcgccgagtggg

SEQ ID NO: 1139 - DNA, 21 bp, Artificial Sequence
  n-mer motif encoding polynucleotide
ggtgtgaattatcatactacg

SEQ ID NO: 1140 - DNA, 21 bp, Artificial Sequence
  n-mer motif encoding polynucleotide
ctgattggggagcttaagatg

SEQ ID NO: 1141 - DNA, 21 bp, Artificial Sequence
  n-mer motif encoding polynucleotide
tatctgaatagtaagcagctt

SEQ ID NO: 1142 - DNA, 21 bp, Artificial Sequence
  n-mer motif encoding polynucleotide
actgttgataggccgattgtg

SEQ ID NO: 1143 - DNA, 21 bp, Artificial Sequence
  n-mer motif encoding polynucleotide
gtcagcaaaaccaaagactcg

SEQ ID NO: 1144 - DNA, 21 bp, Artificial Sequence
  n-mer motif encoding polynucleotide
caagctgggaacgcgccaagg

SEQ ID NO: 1145 - DNA, 21 bp, Artificial Sequence
  n-mer motif encoding polynucleotide
caagaccaaacgagcaaccgt

SEQ ID NO: 1146 - DNA, 21 bp, Artificial Sequence
  n-mer motif encoding polynucleotide
gatactacgtatcggaatact

SEQ ID NO: 1147 - DNA, 21 bp, Artificial Sequence
  n-mer motif encoding polynucleotide
gggacaaccgaagttaacaaa

SEQ ID NO: 1148 - DNA, 21 bp, Artificial Sequence
  n-mer motif encoding polynucleotide
gggtttactaatacgagtaag

SEQ ID NO: 1149 - DNA, 21 bp, Artificial Sequence
  n-mer motif encoding polynucleotide
gtgcagaagaatgatgtgctt

SEQ ID NO: 1150 - DNA, 21 bp, Artificial Sequence
  n-mer motif encoding polynucleotide
agcgtcaacaacatgcgactc

SEQ ID NO: 1151 - DNA, 21 bp, Artificial Sequence
  n-mer motif encoding polynucleotide
ttcagtgccgccttaccgtta

SEQ ID NO: 1152 - DNA, 21 bp, Artificial Sequence
  n-mer motif encoding polynucleotide
gacgtcccaaacaacaaaagg

SEQ ID NO: 1153 - DNA, 21 bp, Artificial Sequence
  n-mer motif encoding polynucleotide
ggtgagactatgcgtcataat

SEQ ID NO: 1154 - DNA, 21 bp, Artificial Sequence
  n-mer motif encoding polynucleotide
attcggacttctgtgattaat

SEQ ID NO: 1155 - DNA, 21 bp, Artificial Sequence
  n-mer motif encoding polynucleotide
ccgcgtgctcctggtcataat

SEQ ID NO: 1156 - DNA, 21 bp, Artificial Sequence
  n-mer motif encoding polynucleotide
agtgttgcgcatcctttgtct

SEQ ID NO: 1157 - DNA, 21 bp, Artificial Sequence
  n-mer motif encoding polynucleotide
atgacaataaccgtcgaaccg

SEQ ID NO: 1158 - DNA, 21 bp, Artificial Sequence
  n-mer motif encoding polynucleotide
ccattaaacgcgaacggctcc

SEQ ID NO: 1159 - DNA, 21 bp, Artificial Sequence
  n-mer motif encoding polynucleotide
aataggcagcgggattttgag

SEQ ID NO: 1160 - DNA, 21 bp, Artificial Sequence
  n-mer motif encoding polynucleotide
gatattcataatccgcgtacg

SEQ ID NO: 1161 - DNA, 21 bp, Artificial Sequence
  n-mer motif encoding polynucleotide
tggatagcaggaaaccactcc

SEQ ID NO: 1162 - DNA, 21 bp, Artificial Sequence
  n-mer motif encoding polynucleotide
tctactcatcatgctgatcgt

SEQ ID NO: 1163 - DNA, 21 bp, Artificial Sequence
  n-mer motif encoding polynucleotide
ccggaatccgccgccaaaagc

SEQ ID NO: 1164 - DNA, 21 bp, Artificial Sequence
  n-mer motif encoding polynucleotide
cactccgacaaagtctcctca

SEQ ID NO: 1165 - DNA, 21 bp, Artificial Sequence
  n-mer motif encoding polynucleotide
tcaaacagcgccgacgcgggg

SEQ ID NO: 1166 - DNA, 21 bp, Artificial Sequence
  n-mer motif encoding polynucleotide
gagtttcagaggattcgtgag

SEQ ID NO: 1167 - DNA, 21 bp, Artificial Sequence
  n-mer motif encoding polynucleotide
tccgcggggatgacattggac

SEQ ID NO: 1168 - DNA, 21 bp, Artificial Sequence
  n-mer motif encoding polynucleotide
actcaaacttctacctggacc

SEQ ID NO: 1169 - DNA, 21 bp, Artificial Sequence
  n-mer motif encoding polynucleotide
acgacactaacgcaaacggac

SEQ ID NO: 1170 - DNA, 21 bp, Artificial Sequence
  n-mer motif encoding polynucleotide
gcctcgaaaggcttcggccac

SEQ ID NO: 1171 - DNA, 21 bp, Artificial Sequence
  n-mer motif encoding polynucleotide
ccggctacgatgattagtgag

SEQ ID NO: 1172 - DNA, 21 bp, Artificial Sequence
  n-mer motif encoding polynucleotide
actgactcatctgcagactcc

SEQ ID NO: 1173 - DNA, 21 bp, Artificial Sequence
  n-mer motif encoding polynucleotide
tcaaccagaaaagaacacgac

SEQ ID NO: 1174 - DNA, 21 bp, Artificial Sequence
  n-mer motif encoding polynucleotide
ggtgatatttcttatagggtt

SEQ ID NO: 1175 - DNA, 21 bp, Artificial Sequence
  n-mer motif encoding polynucleotide
atggggtatgttgatagtctg

SEQ ID NO: 1176 - DNA, 21 bp, Artificial Sequence
  n-mer motif encoding polynucleotide
caaaccatcacctcacaaatg

SEQ ID NO: 1177 - DNA, 21 bp, Artificial Sequence
  n-mer motif encoding polynucleotide
tcgattgggtattcgcctccg

SEQ ID NO: 1178 - DNA, 21 bp, Artificial Sequence
  n-mer motif encoding polynucleotide
tcatccccagactcgtacaga

SEQ ID NO: 1179 - DNA, 21 bp, Artificial Sequence
  n-mer motif encoding polynucleotide
attagtccgagtgcttctaat

SEQ ID NO: 1180 - DNA, 21 bp, Artificial Sequence
  n-mer motif encoding polynucleotide
tatccggctgatcatcggact

SEQ ID NO: 1181 - DNA, 21 bp, Artificial Sequence
  n-mer motif encoding polynucleotide
cacaccggccaaacaccatca

SEQ ID NO: 1182 - DNA, 21 bp, Artificial Sequence
  n-mer motif encoding polynucleotide
cagacgactattctggctgct

SEQ ID NO: 1183 - DNA, 21 bp, Artificial Sequence
  n-mer motif encoding polynucleotide
gatggtacgaggcaggttcat

SEQ ID NO: 1184 - DNA, 21 bp, Artificial Sequence
  n-mer motif encoding polynucleotide
aggagtagtcctgcgacgaat

SEQ ID NO: 1185 - DNA, 21 bp, Artificial Sequence
  n-mer motif encoding polynucleotide
gcgatgagtcatacgtataag

SEQ ID NO: 1186 - DNA, 21 bp, Artificial Sequence
  n-mer motif encoding polynucleotide
atggcggctccgccggagcat

SEQ ID NO: 1187 - DNA, 21 bp, Artificial Sequence
  n-mer motif encoding polynucleotide
ggtcctagtacttcggaggcg

SEQ ID NO: 1188 - DNA, 21 bp, Artificial Sequence
  n-mer motif encoding polynucleotide
cataatcatgataggtcgtct

SEQ ID NO: 1189 - DNA, 21 bp, Artificial Sequence
  n-mer motif encoding polynucleotide
gtggtcccatcgacccaagca

SEQ ID NO: 1190 - DNA, 21 bp, Artificial Sequence
  n-mer motif encoding polynucleotide
attcctgtgactactcgtaat

SEQ ID NO: 1191 - DNA, 21 bp, Artificial Sequence
  n-mer motif encoding polynucleotide
aaccaactcgtacgcgggaca

SEQ ID NO: 1192 - DNA, 21 bp, Artificial Sequence
  n-mer motif encoding polynucleotide
gggtttgcgcttacgggtacg

SEQ ID NO: 1193 - DNA, 21 bp, Artificial Sequence
  n-mer motif encoding polynucleotide
tctaagggtggtgatatggtg

SEQ ID NO: 1194 - DNA, 21 bp, Artificial Sequence
  n-mer motif encoding polynucleotide
gctcgaccaggccaatctatg

SEQ ID NO: 1195 - DNA, 21 bp, Artificial Sequence
  n-mer motif encoding polynucleotide
aaagcagactacgaatcctcc

SEQ ID NO: 1196 - DNA, 21 bp, Artificial Sequence
  n-mer motif encoding polynucleotide
ggaccaagttcgcacatcgtt

SEQ ID NO: 1197 - DNA, 21 bp, Artificial Sequence
  n-mer motif encoding polynucleotide
gaagttgtcaaaaccacgcac

SEQ ID NO: 1198 - DNA, 21 bp, Artificial Sequence
  n-mer motif encoding polynucleotide
actttggataataatcattct

SEQ ID NO: 1199 - DNA, 21 bp, Artificial Sequence
  n-mer motif encoding polynucleotide
acgatttataatatgggtccg

SEQ ID NO: 1200 - DNA, 21 bp, Artificial Sequence
  n-mer motif encoding polynucleotide
tctaccatgaacacgatcacg

SEQ ID NO: 1201 - DNA, 21 bp, Artificial Sequence
  n-mer motif encoding polynucleotide
acgctggcgcggactactgag

SEQ ID NO: 1202 - DNA, 21 bp, Artificial Sequence
  n-mer motif encoding polynucleotide
ttgatttcttcgcagacttct

SEQ ID NO: 1203 - DNA, 21 bp, Artificial Sequence
  n-mer motif encoding polynucleotide
cagactgcgtctggtgatact

SEQ ID NO: 1204 - DNA, 21 bp, Artificial Sequence
  n-mer motif encoding polynucleotide
gcgcatggtgcttttccggtt

SEQ ID NO: 1205 - DNA, 21 bp, Artificial Sequence
  n-mer motif encoding polynucleotide
ggggagacgcggtcgactgct

SEQ ID NO: 1206 - DNA, 21 bp, Artificial Sequence
  n-mer motif encoding polynucleotide
aacaactacgcctactccgct

SEQ ID NO: 1207 - DNA, 21 bp, Artificial Sequence
  n-mer motif encoding polynucleotide
gaggcttatcagactgagaag

SEQ ID NO: 1208 - DNA, 21 bp, Artificial Sequence
  n-mer motif encoding polynucleotide
tctctagcacacgccgtaagc

SEQ ID NO: 1209 - DNA, 21 bp, Artificial Sequence
  n-mer motif encoding polynucleotide
acgtatcagttgagtgggaat

SEQ ID NO: 1210 - DNA, 21 bp, Artificial Sequence
  n-mer motif encoding polynucleotide
atgagcgaaaggttgcggata

SEQ ID NO: 1211 - DNA, 21 bp, Artificial Sequence
  n-mer motif encoding polynucleotide
gggtcggggaaagacccaggg

SEQ ID NO: 1212 - DNA, 21 bp, Artificial Sequence
  n-mer motif encoding polynucleotide
tacaacagcaacgcttctgta

SEQ ID NO: 1213 - DNA, 21 bp, Artificial Sequence
  n-mer motif encoding polynucleotide
acgaggggtgatatggagttt

SEQ ID NO: 1214 - DNA, 21 bp, Artificial Sequence
  n-mer motif encoding polynucleotide
ggaatcaccggaagccccggc

SEQ ID NO: 1215 - DNA, 21 bp, Artificial Sequence
  n-mer motif encoding polynucleotide
caacacaccgcccaccccatg

SEQ ID NO: 1216 - DNA, 21 bp, Artificial Sequence
  n-mer motif encoding polynucleotide
gatacggcgaatcgttcgact

SEQ ID NO: 1217 - DNA, 21 bp, Artificial Sequence
  n-mer motif encoding polynucleotide
tcggcacacgacgcaagacta

SEQ ID NO: 1218 - DNA, 21 bp, Artificial Sequence
  n-mer motif encoding polynucleotide
cttaatcatactctggggcat

SEQ ID NO: 1219 - DNA, 21 bp, Artificial Sequence
  n-mer motif encoding polynucleotide
gggtttgagacgagtagtcct

SEQ ID NO: 1220 - DNA, 21 bp, Artificial Sequence
  n-mer motif encoding polynucleotide
ggtacgagtgcggagagtcgg

SEQ ID NO: 1221 - DNA, 21 bp, Artificial Sequence
  n-mer motif encoding polynucleotide
catgctaattatgttgaggtg

SEQ ID NO: 1222 - DNA, 21 bp, Artificial Sequence
  n-mer motif encoding polynucleotide
acaacgaaaccggtcgcggaa

SEQ ID NO: 1223 - DNA, 21 bp, Artificial Sequence
  n-mer motif encoding polynucleotide
tcgaccgccgttactaactca

SEQ ID NO: 1224 - DNA, 21 bp, Artificial Sequence
  n-mer motif encoding polynucleotide
ctggggcttgctggtcaggtt

SEQ ID NO: 1225 - DNA, 21 bp, Artificial Sequence
  n-mer motif encoding polynucleotide
gtgcttaagggtacgtttccg

SEQ ID NO: 1226 - DNA, 21 bp, Artificial Sequence
  n-mer motif encoding polynucleotide
atgaatgagcctggtaggacg

SEQ ID NO: 1227 - DNA, 21 bp, Artificial Sequence
  n-mer motif encoding polynucleotide
acttctgatcctttgaggaat

SEQ ID NO: 1228 - DNA, 21 bp, Artificial Sequence
  n-mer motif encoding polynucleotide
cgtgatactaatacggataag

SEQ ID NO: 1229 - DNA, 21 bp, Artificial Sequence
  n-mer motif encoding polynucleotide
gagtctgatttgcgtcagcgg

SEQ ID NO: 1230 - DNA, 21 bp, Artificial Sequence
  n-mer motif encoding polynucleotide
tccggaatggccggcctttcc

SEQ ID NO: 1231 - DNA, 21 bp, Artificial Sequence
  n-mer motif encoding polynucleotide
atagcaacaacgtctgggcgg

SEQ ID NO: 1232 - DNA, 21 bp, Artificial Sequence
  n-mer motif encoding polynucleotide
acgattaggagtgagggtttt

SEQ ID NO: 1233 - DNA, 21 bp, Artificial Sequence
  n-mer motif encoding polynucleotide
ggtctgtctattactattgcg

SEQ ID NO: 1234 - DNA, 21 bp, Artificial Sequence
  n-mer motif encoding polynucleotide
ccgcctactaatgggcgtatg

SEQ ID NO: 1235 - DNA, 21 bp, Artificial Sequence
  n-mer motif encoding polynucleotide
ctacaagaccgggcaacgaac

SEQ ID NO: 1236 - DNA, 21 bp, Artificial Sequence
  n-mer motif encoding polynucleotide
cttaaatcgaccggtgaccac

SEQ ID NO: 1237 - DNA, 21 bp, Artificial Sequence
  n-mer motif encoding polynucleotide
gataataataatcaggtttat

SEQ ID NO: 1238 - DNA, 21 bp, Artificial Sequence
  n-mer motif encoding polynucleotide
gtgcatatggagtcgtatgcg

SEQ ID NO: 1239 - DNA, 21 bp, Artificial Sequence
  n-mer motif encoding polynucleotide
gaccaaatagggcacggaaca

SEQ ID NO: 1240 - DNA, 21 bp, Artificial Sequence
  n-mer motif encoding polynucleotide
gggacggggccgcatggtact

SEQ ID NO: 1241 - DNA, 21 bp, Artificial Sequence
  n-mer motif encoding polynucleotide
attgggaataatactggtctt

SEQ ID NO: 1242 - DNA, 21 bp, Artificial Sequence
  n-mer motif encoding polynucleotide
ttaaacgcagaatacaccaac

SEQ ID NO: 1243 - DNA, 21 bp, Artificial Sequence
  n-mer motif encoding polynucleotide
gtgacgtcgtctgctagtggt

SEQ ID NO: 1244 - DNA, 21 bp, Artificial Sequence
  n-mer motif encoding polynucleotide
acgcatgttgctaagcctgat

SEQ ID NO: 1245 - DNA, 21 bp, Artificial Sequence
  n-mer motif encoding polynucleotide
ccgatgaacaaagacatactg

SEQ ID NO: 1246 - DNA, 21 bp, Artificial Sequence
  n-mer motif encoding polynucleotide
cttagtttgaatatgaatgag

SEQ ID NO: 1247 - DNA, 21 bp, Artificial Sequence
  n-mer motif encoding polynucleotide
gtcggcaactcaagcactcac

SEQ ID NO: 1248 - DNA, 21 bp, Artificial Sequence
  n-mer motif encoding polynucleotide
ggccacggaagtgacttgacc

SEQ ID NO: 1249 - DNA, 21 bp, Artificial Sequence
  n-mer motif encoding polynucleotide
cttacacaaaacccaacgaac

SEQ ID NO: 1250 - DNA, 21 bp, Artificial Sequence
  n-mer motif encoding polynucleotide
ccgagtgatcatatgcggact

SEQ ID NO: 1251 - DNA, 21 bp, Artificial Sequence
  n-mer motif encoding polynucleotide
cctgatagtcgtttggcggct

SEQ ID NO: 1252 - DNA, 21 bp, Artificial Sequence
  n-mer motif encoding polynucleotide
tggggtagtgaggggacgatt

SEQ ID NO: 1253 - DNA, 21 bp, Artificial Sequence
  n-mer motif encoding polynucleotide
aaaccgacaaacgactcgtac

SEQ ID NO: 1254 - DNA, 21 bp, Artificial Sequence
  n-mer motif encoding polynucleotide
aaccgcggaacagaagtttac

SEQ ID NO: 1255 - DNA, 21 bp, Artificial Sequence
  n-mer motif encoding polynucleotide
cacgtgatcacaacaaaagac

SEQ ID NO: 1256 - DNA, 21 bp, Artificial Sequence
  n-mer motif encoding polynucleotide
attgtgtctaatccgccggcg

SEQ ID NO: 1257 - DNA, 21 bp, Artificial Sequence
  n-mer motif encoding polynucleotide
atgcgtaacgaccaacaactt

SEQ ID NO: 1258 - DNA, 21 bp, Artificial Sequence
  n-mer motif encoding polynucleotide
tttcagcgtgatgttggtcat

SEQ ID NO: 1259 - DNA, 21 bp, Artificial Sequence
  n-mer motif encoding polynucleotide
gccaacgacaacaccaaacaa

SEQ ID NO: 1260 - DNA, 21 bp, Artificial Sequence
  n-mer motif encoding polynucleotide
tctgttccgcatgcgggggat

SEQ ID NO: 1261 - DNA, 21 bp, Artificial Sequence
  n-mer motif encoding polynucleotide
aatgctactccgccgaatcat

SEQ ID NO: 1262 - DNA, 21 bp, Artificial Sequence
  n-mer motif encoding polynucleotide
tcagaacacacatcagttcta

SEQ ID NO: 1263 - DNA, 21 bp, Artificial Sequence
  n-mer motif encoding polynucleotide
gccatgtcccaaacggacatc

SEQ ID NO: 1264 - DNA, 21 bp, Artificial Sequence
  n-mer motif encoding polynucleotide
cctaaggctccgcttaataat

SEQ ID NO: 1265 - DNA, 21 bp, Artificial Sequence
  n-mer motif encoding polynucleotide
accaacaacttactcgcacaa

SEQ ID NO: 1266 - DNA, 21 bp, Artificial Sequence
  n-mer motif encoding polynucleotide
cagcgtcagggttcgggggtt

SEQ ID NO: 1267 - DNA, 21 bp, Artificial Sequence
  n-mer motif encoding polynucleotide
cgcagtgacaccactaacgcc

SEQ ID NO: 1268 - DNA, 21 bp, Artificial Sequence
  n-mer motif encoding polynucleotide
gaggctgataagaatggtgtt

SEQ ID NO: 1269 - DNA, 21 bp, Artificial Sequence
  n-mer motif encoding polynucleotide
atgctggggggttttgcgcag

SEQ ID NO: 1270 - DNA, 21 bp, Artificial Sequence
  n-mer motif encoding polynucleotide
atgacacacctcagcacagac

SEQ ID NO: 1271 - DNA, 21 bp, Artificial Sequence
  n-mer motif encoding polynucleotide
gttttgtctgataaggcgttt

SEQ ID NO: 1272 - DNA, 21 bp, Artificial Sequence
  n-mer motif encoding polynucleotide
acaccctccggtaccataaaa

SEQ ID NO: 1273 - DNA, 21 bp, Artificial Sequence
  n-mer motif encoding polynucleotide
attattcttatgggtcagagt

SEQ ID NO: 1274 - DNA, 21 bp, Artificial Sequence
  n-mer motif encoding polynucleotide
ctttcggggggtgagactctt

SEQ ID NO: 1275 - DNA, 21 bp, Artificial Sequence
  n-mer motif encoding polynucleotide
accgacggcgccctgggttac

SEQ ID NO: 1276 - DNA, 21 bp, Artificial Sequence
  n-mer motif encoding polynucleotide
gggaataaggctgcgctgacg

SEQ ID NO: 1277 - protein, 7 aa, Artificial Sequence
  n-mer motif
RGDLSTP

SEQ ID NO: 1278 - protein, 7 aa, Artificial Sequence
  n-mer motif
RGDLNQY

SEQ ID NO: 1279 - protein, 7 aa, Artificial Sequence
  n-mer motif
RGDLTTP

SEQ ID NO: 1280 - protein, 7 aa, Artificial Sequence
  n-mer motif
RGDATEL

SEQ ID NO: 1281 - protein, 7 aa, Artificial Sequence
  n-mer motif
RGDQLYH

SEQ ID NO: 1282 - protein, 7 aa, Artificial Sequence
  n-mer motif
RGDLSTP

SEQ ID NO: 1283 - protein, 7 aa, Artificial Sequence
  n-mer motif
RGDVAAK

SEQ ID NO: 1284 - protein, 7 aa, Artificial Sequence
  n-mer motif
RGDLTTP

SEQ ID NO: 1285 - protein, 7 aa, Artificial Sequence
  n-mer motif
RGDLNQY

SEQ ID NO: 1286 - protein, 7 aa, Artificial Sequence
  n-mer motif
RGDTMSK

SEQ ID NO: 1287 - protein, 7 aa, Artificial Sequence
  n-mer motif
RGDVAAK

SEQ ID NO: 1288 - protein, 7 aa, Artificial Sequence
  n-mer motif
RGDTMSK

SEQ ID NO: 1289 - protein, 7 aa, Artificial Sequence
  n-mer motif
RGDATEL

SEQ ID NO: 1290 - protein, 7 aa, Artificial Sequence
  n-mer motif
ARSNDSV

SEQ ID NO: 1291 - protein, 7 aa, Artificial Sequence
  n-mer motif
RGDMNNS

SEQ ID NO: 1292 - protein, 7 aa, Artificial Sequence
  n-mer motif
TMGANGT

SEQ ID NO: 1293 - protein, 7 aa, Artificial Sequence
  n-mer motif
PNVTQSY

SEQ ID NO: 1294 - protein, 7 aa, Artificial Sequence
  n-mer motif
RLDLQVH

SEQ ID NO: 1295 - protein, 7 aa, Artificial Sequence
  n-mer motif
GLSKASD

SEQ ID NO: 1296 - protein, 7 aa, Artificial Sequence
  n-mer motif
DPGRTGT

SEQ ID NO: 1297 - protein, 7 aa, Artificial Sequence
  n-mer motif
YRGREDW

SEQ ID NO: 1298 - protein, 7 aa, Artificial Sequence
  n-mer motif
RYGESIE

SEQ ID NO: 1299 - protein, 7 aa, Artificial Sequence
  n-mer motif
SLNNMGS

SEQ ID NO: 1300 - protein, 7 aa, Artificial Sequence
  n-mer motif
NSDQRNW

SEQ ID NO: 1301 - protein, 7 aa, Artificial Sequence
  n-mer motif
RGDMSRE

SEQ ID NO: 1302 - protein, 7 aa, Artificial Sequence
  n-mer motif
MTDANRI

SEQ ID NO: 1303 - protein, 7 aa, Artificial Sequence
  n-mer motif
VYNGNVV

SEQ ID NO: 1304 - protein, 7 aa, Artificial Sequence
  n-mer motif
RGDMINT

SEQ ID NO: 1305 - protein, 7 aa, Artificial Sequence
  n-mer motif
SGLSHGQ

SEQ ID NO: 1306 - protein, 7 aa, Artificial Sequence
  n-mer motif
TGQLVGT

SEQ ID NO: 1307 - protein, 7 aa, Artificial Sequence
  n-mer motif
ANSIGGP

SEQ ID NO: 1308 - protein, 7 aa, Artificial Sequence
  n-mer motif
YSQSLSE

SEQ ID NO: 1309 - protein, 7 aa, Artificial Sequence
  n-mer motif
YHKYSTD

SEQ ID NO: 1310 - protein, 7 aa, Artificial Sequence
  n-mer motif
ARHDEHV

SEQ ID NO: 1311 - protein, 7 aa, Artificial Sequence
  n-mer motif
AIDSIKQ

SEQ ID NO: 1312 - protein, 7 aa, Artificial Sequence
  n-mer motif
RLDLQVN

SEQ ID NO: 1313 - protein, 7 aa, Artificial Sequence
  n-mer motif
RGDMINT

SEQ ID NO: 1314 - protein, 7 aa, Artificial Sequence
  n-mer motif
SVLSQAN

SEQ ID NO: 1315 - protein, 7 aa, Artificial Sequence
  n-mer motif
FTVNQDL

SEQ ID NO: 1316 - protein, 7 aa, Artificial Sequence
  n-mer motif
TDNGLLV

SEQ ID NO: 1317 - protein, 7 aa, Artificial Sequence
  n-mer motif
YQQTSST

SEQ ID NO: 1318 - protein, 7 aa, Artificial Sequence
  n-mer motif
TEQSYSR

SEQ ID NO: 1319 - protein, 7 aa, Artificial Sequence
  n-mer motif
IMGLSQA

SEQ ID NO: 1320 - protein, 7 aa, Artificial Sequence
  n-mer motif
ATAHQDG

SEQ ID NO: 1321 - protein, 7 aa, Artificial Sequence
  n-mer motif
YNATPSQ

SEQ ID NO: 1322 - protein, 7 aa, Artificial Sequence
  n-mer motif
YTQGIMN

SEQ ID NO: 1323 - protein, 7 aa, Artificial Sequence
  n-mer motif
ESLPISK

SEQ ID NO: 1324 - protein, 7 aa, Artificial Sequence
  n-mer motif
GTVVPGS

SEQ ID NO: 1325 - protein, 7 aa, Artificial Sequence
  n-mer motif
GLASLHL

SEQ ID NO: 1326 - protein, 7 aa, Artificial Sequence
  n-mer motif
YIAAGEQ

SEQ ID NO: 1327 - protein, 7 aa, Artificial Sequence
  n-mer motif
NTYPFNA

SEQ ID NO: 1328 - protein, 7 aa, Artificial Sequence
  n-mer motif
VGASTAS

SEQ ID NO: 1329 - protein, 7 aa, Artificial Sequence
  n-mer motif
GSNYLAN

SEQ ID NO: 1330 - protein, 7 aa, Artificial Sequence
  n-mer motif
DTGRTGT

SEQ ID NO: 1331 - protein, 7 aa, Artificial Sequence
  n-mer motif
KPNTMSD

SEQ ID NO: 1332 - protein, 7 aa, Artificial Sequence
  n-mer motif
VDKSSPV

SEQ ID NO: 1333 - protein, 7 aa, Artificial Sequence
  n-mer motif
SSDPKGQ

SEQ ID NO: 1334 - protein, 7 aa, Artificial Sequence
  n-mer motif
WQTNGMQ

SEQ ID NO: 1335 - protein, 7 aa, Artificial Sequence
  n-mer motif
TGSLNSM

SEQ ID NO: 1336 - protein, 7 aa, Artificial Sequence
  n-mer motif
HSNSSQN

SEQ ID NO: 1337 - protein, 7 aa, Artificial Sequence
  n-mer motif
GRDDLTN

SEQ ID NO: 1338 - protein, 7 aa, Artificial Sequence
  n-mer motif
DTYKGKW

SEQ ID NO: 1339 - protein, 7 aa, Artificial Sequence
  n-mer motif
YTAQTGW

SEQ ID NO: 1340 - protein, 7 aa, Artificial Sequence
  n-mer motif
NQVGASA

SEQ ID NO: 1341 - protein, 7 aa, Artificial Sequence
  n-mer motif
IDVLNGS

SEQ ID NO: 1342 - protein, 7 aa, Artificial Sequence
  n-mer motif
FRTVYTG

SEQ ID NO: 1343 - protein, 7 aa, Artificial Sequence
  n-mer motif
GNMVTPN

SEQ ID NO: 1344 - protein, 7 aa, Artificial Sequence
  n-mer motif
DTYNGKW

SEQ ID NO: 1345 - protein, 7 aa, Artificial Sequence
  n-mer motif
TIQDHIK

SEQ ID NO: 1346 - protein, 7 aa, Artificial Sequence
  n-mer motif
GAKGTMG

SEQ ID NO: 1347 - protein, 7 aa, Artificial Sequence
  n-mer motif
TRSNSDE

SEQ ID NO: 1348 - protein, 7 aa, Artificial Sequence
  n-mer motif
ATTLTGD

SEQ ID NO: 1349 - protein, 7 aa, Artificial Sequence
  n-mer motif
SYGGSGP

SEQ ID NO: 1350 - protein, 7 aa, Artificial Sequence
  n-mer motif
EKSVESK

SEQ ID NO: 1351 - protein, 7 aa, Artificial Sequence
  n-mer motif
RGDTMNY

SEQ ID NO: 1352 - protein, 7 aa, Artificial Sequence
  n-mer motif
RDLGQTG

SEQ ID NO: 1353 - protein, 7 aa, Artificial Sequence
  n-mer motif
SPQLSVM

SEQ ID NO: 1354 - protein, 7 aa, Artificial Sequence
  n-mer motif
RGDNSTP

SEQ ID NO: 1355 - protein, 7 aa, Artificial Sequence
  n-mer motif
PMAGHPP

SEQ ID NO: 1356 - protein, 7 aa, Artificial Sequence
  n-mer motif
TAYQAGL

SEQ ID NO: 1357 - protein, 7 aa, Artificial Sequence
  n-mer motif
VVNQGNQ

SEQ ID NO: 1358 - protein, 7 aa, Artificial Sequence
  n-mer motif
DKTEMLQ

SEQ ID NO: 1359 - protein, 7 aa, Artificial Sequence
  n-mer motif
TVMMSTR

SEQ ID NO: 1360 - protein, 7 aa, Artificial Sequence
  n-mer motif
QQNTRLP

SEQ ID NO: 1361 - protein, 7 aa, Artificial Sequence
  n-mer motif
YQHNQAH

SEQ ID NO: 1362 - protein, 7 aa, Artificial Sequence
  n-mer motif
NQSINNI

SEQ ID NO: 1363 - protein, 7 aa, Artificial Sequence
  n-mer motif
RGDHSTP

SEQ ID NO: 1364 - protein, 7 aa, Artificial Sequence
  n-mer motif
DSTLHLS

SEQ ID NO: 1365 - protein, 7 aa, Artificial Sequence
  n-mer motif
ANIENTS

SEQ ID NO: 1366 - protein, 7 aa, Artificial Sequence
  n-mer motif
TNAALVP

SEQ ID NO: 1367 - protein, 7 aa, Artificial Sequence
  n-mer motif
GQKETTA

SEQ ID NO: 1368 - protein, 7 aa, Artificial Sequence
  n-mer motif
ELNTAHA

SEQ ID NO: 1369 - protein, 7 aa, Artificial Sequence
  n-mer motif
GVSSNSA

SEQ ID NO: 1370 - protein, 7 aa, Artificial Sequence
  n-mer motif
STNAGQR

SEQ ID NO: 1371 - protein, 7 aa, Artificial Sequence
  n-mer motif
EQQKTDN

SEQ ID NO: 1372 - protein, 7 aa, Artificial Sequence
  n-mer motif
AVVNENM

SEQ ID NO: 1373 - protein, 7 aa, Artificial Sequence
  n-mer motif
GSVSTSA

SEQ ID NO: 1374 - protein, 7 aa, Artificial Sequence
  n-mer motif
ELGSQRM

SEQ ID NO: 1375 - protein, 7 aa, Artificial Sequence
  n-mer motif
RGDLSTH

SEQ ID NO: 1376 - protein, 7 aa, Artificial Sequence
  n-mer motif
DHQQALA

SEQ ID NO: 1377 - protein, 7 aa, Artificial Sequence
  n-mer motif
NRSDAHE

SEQ ID NO: 1378 - protein, 7 aa, Artificial Sequence
  n-mer motif
NVNAQSR

SEQ ID NO: 1379 - protein, 7 aa, Artificial Sequence
  n-mer motif
TQGNNMV

SEQ ID NO: 1380 - protein, 7 aa, Artificial Sequence
  n-mer motif
TALNTYP

SEQ ID NO: 1381 - protein, 7 aa, Artificial Sequence
  n-mer motif
VSTYLLA

SEQ ID NO: 1382 - protein, 7 aa, Artificial Sequence
  n-mer motif
GGNYNTT

SEQ ID NO: 1383 - protein, 7 aa, Artificial Sequence
  n-mer motif
SNIKPEI

SEQ ID NO: 1384 - protein, 7 aa, Artificial Sequence
  n-mer motif
PRVHGQV

SEQ ID NO: 1385 - protein, 7 aa, Artificial Sequence
  n-mer motif
SNSNTAA

SEQ ID NO: 1386 - protein, 7 aa, Artificial Sequence
  n-mer motif
LEVATSP

SEQ ID NO: 1387 - protein, 7 aa, Artificial Sequence
  n-mer motif
HDADKLA

SEQ ID NO: 1388 - protein, 7 aa, Artificial Sequence
  n-mer motif
GVYIDGR

SEQ ID NO: 1389 - protein, 7 aa, Artificial Sequence
  n-mer motif
SMQSYTM

SEQ ID NO: 1390 - protein, 7 aa, Artificial Sequence
  n-mer motif
SKGNEQM

SEQ ID NO: 1391 - protein, 7 aa, Artificial Sequence
  n-mer motif
GRDYAMS

SEQ ID NO: 1392 - protein, 7 aa, Artificial Sequence
  n-mer motif
TDGIFQP

SEQ ID NO: 1393 - protein, 7 aa, Artificial Sequence
  n-mer motif
GSPVIVN

SEQ ID NO: 1394 - protein, 7 aa, Artificial Sequence
  n-mer motif
TLTDVHR

SEQ ID NO: 1395 - protein, 7 aa, Artificial Sequence
  n-mer motif
KSEVPAR

SEQ ID NO: 1396 - protein, 7 aa, Artificial Sequence
  n-mer motif
VNTGALL

SEQ ID NO: 1397 - protein, 7 aa, Artificial Sequence
  n-mer motif
SQQGFTL

SEQ ID NO: 1398 - protein, 7 aa, Artificial Sequence
  n-mer motif
NNKSVPD

SEQ ID NO: 1399 - protein, 7 aa, Artificial Sequence
  n-mer motif
SVMVGTN

SEQ ID NO: 1400 - protein, 7 aa, Artificial Sequence
  n-mer motif
RNENTYN

SEQ ID NO: 1401 - protein, 7 aa, Artificial Sequence
  n-mer motif
QANLSII

SEQ ID NO: 1402 - protein, 7 aa, Artificial Sequence
  n-mer motif
PGRDSRT

SEQ ID NO: 1403 - protein, 7 aa, Artificial Sequence
  n-mer motif
FPANGGA

SEQ ID NO: 1404 - protein, 7 aa, Artificial Sequence
  n-mer motif
AGKDLSN

SEQ ID NO: 1405 - protein, 7 aa, Artificial Sequence
  n-mer motif
AQFESGR

SEQ ID NO: 1406 - protein, 7 aa, Artificial Sequence
  n-mer motif
GYGSYSN

SEQ ID NO: 1407 - protein, 7 aa, Artificial Sequence
  n-mer motif
TIVSAYA

SEQ ID NO: 1408 - protein, 7 aa, Artificial Sequence
  n-mer motif
NVSPNLT

SEQ ID NO: 1409 - protein, 7 aa, Artificial Sequence
  n-mer motif
RGDLSTP

SEQ ID NO: 1410 - protein, 7 aa, Artificial Sequence
  n-mer motif
FLEGVAQ

SEQ ID NO: 1411 - protein, 7 aa, Artificial Sequence
  n-mer motif
GSERGER

SEQ ID NO: 1412 - protein, 7 aa, Artificial Sequence
  n-mer motif
LNVGSSL

SEQ ID NO: 1413 - protein, 7 aa, Artificial Sequence
  n-mer motif
RIVANEQ

SEQ ID NO: 1414 - protein, 7 aa, Artificial Sequence
  n-mer motif
QSIGHPV

SEQ ID NO: 1415 - protein, 7 aa, Artificial Sequence
  n-mer motif
GGMSAHS

SEQ ID NO: 1416 - protein, 7 aa, Artificial Sequence
  n-mer motif
HSTTSMT

SEQ ID NO: 1417 - protein, 7 aa, Artificial Sequence
  n-mer motif
TVNGTNV

SEQ ID NO: 1418 - protein, 7 aa, Artificial Sequence
  n-mer motif
LAPDNIG

SEQ ID NO: 1419 - protein, 7 aa, Artificial Sequence
  n-mer motif
QTATLVA

SEQ ID NO: 1420 - protein, 7 aa, Artificial Sequence
  n-mer motif
ASAPSEF

SEQ ID NO: 1421 - protein, 7 aa, Artificial Sequence
  n-mer motif
SMEGQQH

SEQ ID NO: 1422 - protein, 7 aa, Artificial Sequence
  n-mer motif
QDVGRTN

SEQ ID NO: 1423 - protein, 7 aa, Artificial Sequence
  n-mer motif
VYNGNEV

SEQ ID NO: 1424 - protein, 7 aa, Artificial Sequence
  n-mer motif
AQAQTGW

SEQ ID NO: 1425 - protein, 7 aa, Artificial Sequence
  n-mer motif
RLDLTHT

SEQ ID NO: 1426 - protein, 7 aa, Artificial Sequence
  n-mer motif
AAHGREQ

SEQ ID NO: 1427 - protein, 7 aa, Artificial Sequence
  n-mer motif
RGDLYTP

SEQ ID NO: 1428 - protein, 7 aa, Artificial Sequence
  n-mer motif
GMQQREK

SEQ ID NO: 1429 - protein, 7 aa, Artificial Sequence
  n-mer motif
QTQASTN

SEQ ID NO: 1430 - protein, 7 aa, Artificial Sequence
  n-mer motif
RDTNALG

SEQ ID NO: 1431 - protein, 7 aa, Artificial Sequence
  n-mer motif
SSQISNS

SEQ ID NO: 1432 - protein, 7 aa, Artificial Sequence
  n-mer motif
QSVNSTS

SEQ ID NO: 1433 - protein, 7 aa, Artificial Sequence
  n-mer motif
ALERAQY

SEQ ID NO: 1434 - protein, 7 aa, Artificial Sequence
  n-mer motif
HTGHSSV

SEQ ID NO: 1435 - protein, 7 aa, Artificial Sequence
  n-mer motif
RGDMTRA

SEQ ID NO: 1436 - protein, 7 aa, Artificial Sequence
  n-mer motif
FQRDLGH

SEQ ID NO: 1437 - protein, 7 aa, Artificial Sequence
  n-mer motif
TTGDIIR

SEQ ID NO: 1438 - protein, 7 aa, Artificial Sequence
  n-mer motif
SFQTDRA

SEQ ID NO: 1439 - protein, 7 aa, Artificial Sequence
  n-mer motif
QSSDGRV

SEQ ID NO: 1440 - protein, 7 aa, Artificial Sequence
  n-mer motif
TSGALTR

SEQ ID NO: 1441 - protein, 7 aa, Artificial Sequence
  n-mer motif
NSNTVNT

SEQ ID NO: 1442 - protein, 7 aa, Artificial Sequence
  n-mer motif
ISGSSSL

SEQ ID NO: 1443 - protein, 7 aa, Artificial Sequence
  n-mer motif
NDKSTNV

SEQ ID NO: 1444 - protein, 7 aa, Artificial Sequence
  n-mer motif
IVLAPTS

SEQ ID NO: 1445 - protein, 7 aa, Artificial Sequence
  n-mer motif
SGVNYGV

SEQ ID NO: 1446 - protein, 7 aa, Artificial Sequence
  n-mer motif
VGAQRDP

SEQ ID NO: 1447 - protein, 7 aa, Artificial Sequence
  n-mer motif
TGMNSNK

SEQ ID NO: 1448 - protein, 7 aa, Artificial Sequence
  n-mer motif
IEAYSRD

SEQ ID NO: 1449 - protein, 7 aa, Artificial Sequence
  n-mer motif
LHTTLMP

SEQ ID NO: 1450 - protein, 7 aa, Artificial Sequence
  n-mer motif
SDNHLKT

SEQ ID NO: 1451 - protein, 7 aa, Artificial Sequence
  n-mer motif
RNEDKGG

SEQ ID NO: 1452 - protein, 7 aa, Artificial Sequence
  n-mer motif
TKGANGT

SEQ ID NO: 1453 - protein, 7 aa, Artificial Sequence
  n-mer motif
VYNGNVE

SEQ ID NO: 1454 - protein, 7 aa, Artificial Sequence
  n-mer motif
SNSGGNH

SEQ ID NO: 1455 - protein, 7 aa, Artificial Sequence
  n-mer motif
VAAGPEA

SEQ ID NO: 1456 - protein, 7 aa, Artificial Sequence
  n-mer motif
TSLSGSA

SEQ ID NO: 1457 - protein, 7 aa, Artificial Sequence
  n-mer motif
VGLQSNT

SEQ ID NO: 1458 - protein, 7 aa, Artificial Sequence
  n-mer motif
HTAHSVD

SEQ ID NO: 1459 - protein, 7 aa, Artificial Sequence
  n-mer motif
NVGMSST

SEQ ID NO: 1460 - protein, 7 aa, Artificial Sequence
  n-mer motif
HADVNAG

SEQ ID NO: 1461 - protein, 7 aa, Artificial Sequence
  n-mer motif
KAGQLVE

SEQ ID NO: 1462 - protein, 7 aa, Artificial Sequence
  n-mer motif
STFSVLP

SEQ ID NO: 1463 - protein, 7 aa, Artificial Sequence
  n-mer motif
PQSPSRV

SEQ ID NO: 1464 - protein, 7 aa, Artificial Sequence
  n-mer motif
HTATLSS

SEQ ID NO: 1465 - protein, 7 aa, Artificial Sequence
  n-mer motif
LPRHDQY

SEQ ID NO: 1466 - protein, 7 aa, Artificial Sequence
  n-mer motif
QVNNPLT

SEQ ID NO: 1467 - protein, 7 aa, Artificial Sequence
  n-mer motif
TTETARG

SEQ ID NO: 1468 - protein, 7 aa, Artificial Sequence
  n-mer motif
VHGTLTY

SEQ ID NO: 1469 - protein, 7 aa, Artificial Sequence
  n-mer motif
YSTDLRM

SEQ ID NO: 1470 - protein, 7 aa, Artificial Sequence
  n-mer motif
AHATSST

SEQ ID NO: 1471 - protein, 7 aa, Artificial Sequence
  n-mer motif
RESAALA

SEQ ID NO: 1472 - protein, 7 aa, Artificial Sequence
  n-mer motif
KDTNQQI

SEQ ID NO: 1473 - protein, 7 aa, Artificial Sequence
  n-mer motif
SMQSYTM

SEQ ID NO: 1474 - protein, 7 aa, Artificial Sequence
  n-mer motif
TAYSPTV

SEQ ID NO: 1475 - protein, 7 aa, Artificial Sequence
  n-mer motif
ESAHQRI

SEQ ID NO: 1476 - protein, 7 aa, Artificial Sequence
  n-mer motif
RYTTAQQ

SEQ ID NO: 1477 - protein, 7 aa, Artificial Sequence
  n-mer motif
TSVANVS

SEQ ID NO: 1478 - protein, 7 aa, Artificial Sequence
  n-mer motif
RDQHTSI

SEQ ID NO: 1479 - protein, 7 aa, Artificial Sequence
  n-mer motif
SVTSSGP

SEQ ID NO: 1480 - protein, 7 aa, Artificial Sequence
  n-mer motif
AVVLNSN

SEQ ID NO: 1481 - protein, 7 aa, Artificial Sequence
  n-mer motif
PGNPSSN

SEQ ID NO: 1482 - protein, 7 aa, Artificial Sequence
  n-mer motif
TGSTTQL

SEQ ID NO: 1483 - protein, 7 aa, Artificial Sequence
  n-mer motif
ANEHNVG

SEQ ID NO: 1484 - protein, 7 aa, Artificial Sequence
  n-mer motif
MQREAAN

SEQ ID NO: 1485 - protein, 7 aa, Artificial Sequence
  n-mer motif
LTDTNTR

SEQ ID NO: 1486 - protein, 7 aa, Artificial Sequence
  n-mer motif
RMTEISY

SEQ ID NO: 1487 - protein, 7 aa, Artificial Sequence
  n-mer motif
KVDMTSK

SEQ ID NO: 1488 - protein, 7 aa, Artificial Sequence
  n-mer motif
RGDLSTP

SEQ ID NO: 1489 - protein, 7 aa, Artificial Sequence
  n-mer motif
QAKASTT

SEQ ID NO: 1490 - protein, 7 aa, Artificial Sequence
  n-mer motif
LPSTETL

SEQ ID NO: 1491 - protein, 7 aa, Artificial Sequence
  n-mer motif
SSALNAY

SEQ ID NO: 1492 - protein, 7 aa, Artificial Sequence
  n-mer motif
SSDPKGQ

SEQ ID NO: 1493 - protein, 7 aa, Artificial Sequence
  n-mer motif
LDVTRMR

SEQ ID NO: 1494 - protein, 7 aa, Artificial Sequence
  n-mer motif
ADGGDKG

SEQ ID NO: 1495 - protein, 7 aa, Artificial Sequence
  n-mer motif
MLSQVTL

SEQ ID NO: 1496 - protein, 7 aa, Artificial Sequence
  n-mer motif
SVSSVVL

SEQ ID NO: 1497 - protein, 7 aa, Artificial Sequence
  n-mer motif
TESQTMR

SEQ ID NO: 1498 - protein, 7 aa, Artificial Sequence
  n-mer motif
FGSQEKL

SEQ ID NO: 1499 - protein, 7 aa, Artificial Sequence
  n-mer motif
TAGGERA

SEQ ID NO: 1500 - protein, 7 aa, Artificial Sequence
  n-mer motif
DHSKQSS

SEQ ID NO: 1501 - protein, 7 aa, Artificial Sequence
  n-mer motif
IDSTWNT

SEQ ID NO: 1502 - protein, 7 aa, Artificial Sequence
  n-mer motif
SPRPELR

SEQ ID NO: 1503 - protein, 7 aa, Artificial Sequence
  n-mer motif
SIATATS

SEQ ID NO: 1504 - protein, 7 aa, Artificial Sequence
  n-mer motif
VIGGHGT

SEQ ID NO: 1505 - protein, 7 aa, Artificial Sequence
  n-mer motif
STAMYPH

SEQ ID NO: 1506 - protein, 7 aa, Artificial Sequence
  n-mer motif
RDLRPVT

SEQ ID NO: 1507 - protein, 7 aa, Artificial Sequence
  n-mer motif
AHLTDLP

SEQ ID NO: 1508 - protein, 7 aa, Artificial Sequence
  n-mer motif
FLNSTQL

SEQ ID NO: 1509 - protein, 7 aa, Artificial Sequence
  n-mer motif
LNNSATV

SEQ ID NO: 1510 - protein, 7 aa, Artificial Sequence
  n-mer motif
DRPNNMT

SEQ ID NO: 1511 - protein, 7 aa, Artificial Sequence
  n-mer motif
SSSDSPR

SEQ ID NO: 1512 - protein, 7 aa, Artificial Sequence
  n-mer motif
RLDVGSP

SEQ ID NO: 1513 - protein, 7 aa, Artificial Sequence
  n-mer motif
AQQSLHG

SEQ ID NO: 1514 - protein, 7 aa, Artificial Sequence
  n-mer motif
MGKHEGL

SEQ ID NO: 1515 - protein, 7 aa, Artificial Sequence
  n-mer motif
ENAREGV

SEQ ID NO: 1516 - protein, 7 aa, Artificial Sequence
  n-mer motif
TVSLSEG

SEQ ID NO: 1517 - protein, 7 aa, Artificial Sequence
  n-mer motif
LNTLIDR

SEQ ID NO: 1518 - protein, 7 aa, Artificial Sequence
  n-mer motif
ELSVPKP

SEQ ID NO: 1519 - protein, 7 aa, Artificial Sequence
  n-mer motif
KDKNVYI

SEQ ID NO: 1520 - protein, 7 aa, Artificial Sequence
  n-mer motif
NANGPVS

SEQ ID NO: 1521 - protein, 7 aa, Artificial Sequence
  n-mer motif
LTTNGML

SEQ ID NO: 1522 - protein, 7 aa, Artificial Sequence
  n-mer motif
AGESSPT

SEQ ID NO: 1523 - protein, 7 aa, Artificial Sequence
  n-mer motif
SGIGTYS

SEQ ID NO: 1524 - protein, 7 aa, Artificial Sequence
  n-mer motif
VRSMDEL

SEQ ID NO: 1525 - protein, 7 aa, Artificial Sequence
  n-mer motif
MNTGSSS

SEQ ID NO: 1526 - protein, 7 aa, Artificial Sequence
  n-mer motif
GVTVREL

SEQ ID NO: 1527 - protein, 7 aa, Artificial Sequence
  n-mer motif
QILNYSV

SEQ ID NO: 1528 - protein, 7 aa, Artificial Sequence
  n-mer motif
MAGEYRV

SEQ ID NO: 1529 - protein, 7 aa, Artificial Sequence
  n-mer motif
WSHDRPT

SEQ ID NO: 1530 - protein, 7 aa, Artificial Sequence
  n-mer motif
CKNNSEC

SEQ ID NO: 1531 - protein, 7 aa, Artificial Sequence
  n-mer motif
LTTNSHY

SEQ ID NO: 1532 - protein, 7 aa, Artificial Sequence
  n-mer motif
MLVQNTP

SEQ ID NO: 1533 - protein, 7 aa, Artificial Sequence
  n-mer motif
RGATEHA

SEQ ID NO: 1534 - protein, 7 aa, Artificial Sequence
  n-mer motif
ASNGSMG

SEQ ID NO: 1535 - protein, 7 aa, Artificial Sequence
  n-mer motif
NSYTAGK

SEQ ID NO: 1536 - protein, 7 aa, Artificial Sequence
  n-mer motif
STQGAIL

SEQ ID NO: 1537 - protein, 7 aa, Artificial Sequence
  n-mer motif
WNTNMAI

SEQ ID NO: 1538 - protein, 7 aa, Artificial Sequence
  n-mer motif
VSSYEKI

SEQ ID NO: 1539 - protein, 7 aa, Artificial Sequence
  n-mer motif
VLSTGQR

SEQ ID NO: 1540 - protein, 7 aa, Artificial Sequence
  n-mer motif
PIPHGSS

SEQ ID NO: 1541 - protein, 7 aa, Artificial Sequence
  n-mer motif
NVSLTQT

SEQ ID NO: 1542 - protein, 7 aa, Artificial Sequence
  n-mer motif
STIGNST

SEQ ID NO: 1543 - protein, 7 aa, Artificial Sequence
  n-mer motif
SEKLTDK

SEQ ID NO: 1544 - protein, 7 aa, Artificial Sequence
  n-mer motif
SKDSNIS

SEQ ID NO: 1545 - protein, 7 aa, Artificial Sequence
  n-mer motif
ANSNHER

SEQ ID NO: 1546 - protein, 7 aa, Artificial Sequence
  n-mer motif
RDTGDKA

SEQ ID NO: 1547 - protein, 7 aa, Artificial Sequence
  n-mer motif
RTDTPST

SEQ ID NO: 1548 - protein, 7 aa, Artificial Sequence
  n-mer motif
PTMSSLN

SEQ ID NO: 1549 - protein, 7 aa, Artificial Sequence
  n-mer motif
DITNQSY

SEQ ID NO: 1550 - protein, 7 aa, Artificial Sequence
  n-mer motif
LVKPETW

SEQ ID NO: 1551 - protein, 7 aa, Artificial Sequence
  n-mer motif
GTSLENR

SEQ ID NO: 1552 - protein, 7 aa, Artificial Sequence
  n-mer motif
AAGNPTR

SEQ ID NO: 1553 - protein, 7 aa, Artificial Sequence
  n-mer motif
HNVGLGH

SEQ ID NO: 1554 - protein, 7 aa, Artificial Sequence
  n-mer motif
VSTTTDR

SEQ ID NO: 1555 - protein, 7 aa, Artificial Sequence
  n-mer motif
YLSSGKM

SEQ ID NO: 1556 - protein, 7 aa, Artificial Sequence
  n-mer motif
DSRNAAL

SEQ ID NO: 1557 - protein, 7 aa, Artificial Sequence
  n-mer motif
VERNTDM

SEQ ID NO: 1558 - protein, 7 aa, Artificial Sequence
  n-mer motif
TVGSNSI

SEQ ID NO: 1559 - protein, 7 aa, Artificial Sequence
  n-mer motif
VRSGNKP

SEQ ID NO: 1560 - protein, 7 aa, Artificial Sequence
  n-mer motif
GSSGNSG

SEQ ID NO: 1561 - protein, 7 aa, Artificial Sequence
  n-mer motif
STSIGVV

SEQ ID NO: 1562 - protein, 7 aa, Artificial Sequence
  n-mer motif
PSQSRSL

SEQ ID NO: 1563 - protein, 7 aa, Artificial Sequence
  n-mer motif
RNENLNN

SEQ ID NO: 1564 - protein, 7 aa, Artificial Sequence
  n-mer motif
SLGKREE

SEQ ID NO: 1565 - protein, 7 aa, Artificial Sequence
  n-mer motif
SRLDSSS

SEQ ID NO: 1566 - protein, 7 aa, Artificial Sequence
  n-mer motif
DSTYVLA

SEQ ID NO: 1567 - protein, 7 aa, Artificial Sequence
  n-mer motif
ERNPISD

SEQ ID NO: 1568 - protein, 7 aa, Artificial Sequence
  n-mer motif
VSSGHTK

SEQ ID NO: 1569 - protein, 7 aa, Artificial Sequence
  n-mer motif
KYTESNA

SEQ ID NO: 1570 - protein, 7 aa, Artificial Sequence
  n-mer motif
NRNSVGT

SEQ ID NO: 1571 - protein, 7 aa, Artificial Sequence
  n-mer motif
HESHYVS

SEQ ID NO: 1572 - protein, 7 aa, Artificial Sequence
  n-mer motif
TTGGTGM

SEQ ID NO: 1573 - protein, 7 aa, Artificial Sequence
  n-mer motif
ATDKMTP

SEQ ID NO: 1574 - protein, 7 aa, Artificial Sequence
  n-mer motif
SASSGAT

SEQ ID NO: 1575 - protein, 7 aa, Artificial Sequence
  n-mer motif
STTTGHM

SEQ ID NO: 1576 - protein, 7 aa, Artificial Sequence
  n-mer motif
IIASSTT

SEQ ID NO: 1577 - protein, 7 aa, Artificial Sequence
  n-mer motif
DTGSRIA

SEQ ID NO: 1578 - protein, 7 aa, Artificial Sequence
  n-mer motif
WADDSQR

SEQ ID NO: 1579 - protein, 7 aa, Artificial Sequence
  n-mer motif
RGNTLEM

SEQ ID NO: 1580 - protein, 7 aa, Artificial Sequence
  n-mer motif
NLQVNAN

SEQ ID NO: 1581 - protein, 7 aa, Artificial Sequence
  n-mer motif
ATTQLMT

SEQ ID NO: 1582 - protein, 7 aa, Artificial Sequence
  n-mer motif
ADTNIIV

SEQ ID NO: 1583 - protein, 7 aa, Artificial Sequence
  n-mer motif
AITITQK

SEQ ID NO: 1584 - protein, 7 aa, Artificial Sequence
  n-mer motif
DSNKGAT

SEQ ID NO: 1585 - protein, 7 aa, Artificial Sequence
  n-mer motif
GNASGNP

SEQ ID NO: 1586 - protein, 7 aa, Artificial Sequence
  n-mer motif
TMGAKGT

SEQ ID NO: 1587 - protein, 7 aa, Artificial Sequence
  n-mer motif
YLQTGTL

SEQ ID NO: 1588 - protein, 7 aa, Artificial Sequence
  n-mer motif
ALHTKDL

SEQ ID NO: 1589 - protein, 7 aa, Artificial Sequence
  n-mer motif
VDKSEAV

SEQ ID NO: 1590 - protein, 7 aa, Artificial Sequence
  n-mer motif
GRTDLMA

SEQ ID NO: 1591 - protein, 7 aa, Artificial Sequence
  n-mer motif
GTEPRTA

SEQ ID NO: 1592 - protein, 7 aa, Artificial Sequence
  n-mer motif
RGDMSRE

SEQ ID NO: 1593 - protein, 7 aa, Artificial Sequence
  n-mer motif
RGDTKSK

SEQ ID NO: 1594 - protein, 7 aa, Artificial Sequence
  n-mer motif
GTLASMS

SEQ ID NO: 1595 - protein, 7 aa, Artificial Sequence
  n-mer motif
QKSVTYS

SEQ ID NO: 1596 - protein, 7 aa, Artificial Sequence
  n-mer motif
STGQTLV

SEQ ID NO: 1597 - protein, 7 aa, Artificial Sequence
  n-mer motif
SHINMGS

SEQ ID NO: 1598 - protein, 7 aa, Artificial Sequence
  n-mer motif
ALNGTGN

SEQ ID NO: 1599 - protein, 7 aa, Artificial Sequence
  n-mer motif
TTSSNQH

SEQ ID NO: 1600 - protein, 7 aa, Artificial Sequence
  n-mer motif
KNYASTD

SEQ ID NO: 1601 - protein, 7 aa, Artificial Sequence
  n-mer motif
ESTSRTY

SEQ ID NO: 1602 - protein, 7 aa, Artificial Sequence
  n-mer motif
PRSITEL

SEQ ID NO: 1603 - protein, 7 aa, Artificial Sequence
  n-mer motif
YIAGGEK

SEQ ID NO: 1604 - protein, 7 aa, Artificial Sequence
  n-mer motif
TSNYMHE

SEQ ID NO: 1605 - protein, 7 aa, Artificial Sequence
  n-mer motif
LDPNSTR

SEQ ID NO: 1606 - protein, 7 aa, Artificial Sequence
  n-mer motif
HSDMGSS

SEQ ID NO: 1607 - protein, 7 aa, Artificial Sequence
  n-mer motif
DTANRST

SEQ ID NO: 1608 - protein, 7 aa, Artificial Sequence
  n-mer motif
NAGHSGQ

SEQ ID NO: 1609 - protein, 7 aa, Artificial Sequence
  n-mer motif
SLGSDRM

SEQ ID NO: 1610 - protein, 7 aa, Artificial Sequence
  n-mer motif
DNQQALA

SEQ ID NO: 1611 - protein, 7 aa, Artificial Sequence
  n-mer motif
PSSAGST

SEQ ID NO: 1612 - protein, 7 aa, Artificial Sequence
  n-mer motif
DRKGYDA

SEQ ID NO: 1613 - protein, 7 aa, Artificial Sequence
  n-mer motif
GGNQNLT

SEQ ID NO: 1614 - protein, 7 aa, Artificial Sequence
  n-mer motif
VNLNETE

SEQ ID NO: 1615 - protein, 7 aa, Artificial Sequence
  n-mer motif
SPGNGLL

SEQ ID NO: 1616 - protein, 7 aa, Artificial Sequence
  n-mer motif
SVGDLTK

SEQ ID NO: 1617 - protein, 7 aa, Artificial Sequence
  n-mer motif
RYESVGL

SEQ ID NO: 1618 - protein, 7 aa, Artificial Sequence
  n-mer motif
TRELTKN

SEQ ID NO: 1619 - protein, 7 aa, Artificial Sequence
  n-mer motif
TPTNGNP

SEQ ID NO: 1620 - protein, 7 aa, Artificial Sequence
  n-mer motif
ATDQRSR

SEQ ID NO: 1621 - protein, 7 aa, Artificial Sequence
  n-mer motif
GTSAESR

SEQ ID NO: 1622 - protein, 7 aa, Artificial Sequence
  n-mer motif
RMLSTLP

SEQ ID NO: 1623 - protein, 7 aa, Artificial Sequence
  n-mer motif
GINSSHF

SEQ ID NO: 1624 - protein, 7 aa, Artificial Sequence
  n-mer motif
SSSTEGQ

SEQ ID NO: 1625 - protein, 7 aa, Artificial Sequence
  n-mer motif
DKQQTGQ

SEQ ID NO: 1626 - protein, 7 aa, Artificial Sequence
  n-mer motif
TQHLPST

SEQ ID NO: 1627 - protein, 7 aa, Artificial Sequence
  n-mer motif
GLGQPQL

SEQ ID NO: 1628 - protein, 7 aa, Artificial Sequence
  n-mer motif
VTNESRA

SEQ ID NO: 1629 - protein, 7 aa, Artificial Sequence
  n-mer motif
GNSNYRE

SEQ ID NO: 1630 - protein, 7 aa, Artificial Sequence
  n-mer motif
WNAENSK

SEQ ID NO: 1631 - protein, 7 aa, Artificial Sequence
  n-mer motif
PGSQRQD

SEQ ID NO: 1632 - protein, 7 aa, Artificial Sequence
  n-mer motif
HTYSQAD

SEQ ID NO: 1633 - protein, 7 aa, Artificial Sequence
  n-mer motif
TAGNLRS

SEQ ID NO: 1634 - protein, 7 aa, Artificial Sequence
  n-mer motif
GRHLQSD

SEQ ID NO: 1635 - protein, 7 aa, Artificial Sequence
  n-mer motif
NNAHTAT

SEQ ID NO: 1636 - protein, 7 aa, Artificial Sequence
  n-mer motif
STSQENR

SEQ ID NO: 1637 - protein, 7 aa, Artificial Sequence
  n-mer motif
RGDTMNY

SEQ ID NO: 1638 - protein, 7 aa, Artificial Sequence
  n-mer motif
PVATQHA

SEQ ID NO: 1639 - protein, 7 aa, Artificial Sequence
  n-mer motif
GHLNAPT

SEQ ID NO: 1640 - protein, 7 aa, Artificial Sequence
  n-mer motif
QILNYSV

SEQ ID NO: 1641 - protein, 7 aa, Artificial Sequence
  n-mer motif
QNHASGE

SEQ ID NO: 1642 - protein, 7 aa, Artificial Sequence
  n-mer motif
GLTGREL

SEQ ID NO: 1643 - protein, 7 aa, Artificial Sequence
  n-mer motif
DVAVTQH

SEQ ID NO: 1644 - protein, 7 aa, Artificial Sequence
  n-mer motif
ATYTGRT

SEQ ID NO: 1645 - protein, 7 aa, Artificial Sequence
  n-mer motif
KELQWQR

SEQ ID NO: 1646 - protein, 7 aa, Artificial Sequence
  n-mer motif
ASYSSMV

SEQ ID NO: 1647 - protein, 7 aa, Artificial Sequence
  n-mer motif
VISHGAL

SEQ ID NO: 1648 - protein, 7 aa, Artificial Sequence
  n-mer motif
PIHHGSS

SEQ ID NO: 1649 - protein, 7 aa, Artificial Sequence
  n-mer motif
VDKNHPL

SEQ ID NO: 1650 - protein, 7 aa, Artificial Sequence
  n-mer motif
TSGDRYT

SEQ ID NO: 1651 - protein, 7 aa, Artificial Sequence
  n-mer motif
GTKSWPV

SEQ ID NO: 1652 - protein, 7 aa, Artificial Sequence
  n-mer motif
YNAHESF

SEQ ID NO: 1653 - protein, 7 aa, Artificial Sequence
  n-mer motif
RVHDTPS

SEQ ID NO: 1654 - protein, 7 aa, Artificial Sequence
  n-mer motif
AQIESGR

SEQ ID NO: 1655 - protein, 7 aa, Artificial Sequence
  n-mer motif
WKDNMRM

SEQ ID NO: 1656 - protein, 7 aa, Artificial Sequence
  n-mer motif
MPSEPPG

SEQ ID NO: 1657 - protein, 7 aa, Artificial Sequence
  n-mer motif
RGDYPTS

SEQ ID NO: 1658 - protein, 7 aa, Artificial Sequence
  n-mer motif
FHNESYG

SEQ ID NO: 1659 - protein, 7 aa, Artificial Sequence
  n-mer motif
LNTMIDK

SEQ ID NO: 1660 - protein, 7 aa, Artificial Sequence
  n-mer motif
STLSQGA

SEQ ID NO: 1661 - protein, 7 aa, Artificial Sequence
  n-mer motif
PLHNIPP

SEQ ID NO: 1662 - protein, 7 aa, Artificial Sequence
  n-mer motif
ASSTFLP

SEQ ID NO: 1663 - protein, 7 aa, Artificial Sequence
  n-mer motif
MEGMGLG

SEQ ID NO: 1664 - protein, 7 aa, Artificial Sequence
  n-mer motif
KDYKPYA

SEQ ID NO: 1665 - protein, 7 aa, Artificial Sequence
  n-mer motif
NLQSGVQ

SEQ ID NO: 1666 - protein, 7 aa, Artificial Sequence
  n-mer motif
TTLSQQS

SEQ ID NO: 1667 - protein, 7 aa, Artificial Sequence
  n-mer motif
LMSSTSS

SEQ ID NO: 1668 - protein, 7 aa, Artificial Sequence
  n-mer motif
TGQGFSA

SEQ ID NO: 1669 - protein, 7 aa, Artificial Sequence
  n-mer motif
STIGNST

SEQ ID NO: 1670 - protein, 7 aa, Artificial Sequence
  n-mer motif
LRASEAP

SEQ ID NO: 1671 - protein, 7 aa, Artificial Sequence
  n-mer motif
QPNNGNH

SEQ ID NO: 1672 - protein, 7 aa, Artificial Sequence
  n-mer motif
SSDVTRQ

SEQ ID NO: 1673 - protein, 7 aa, Artificial Sequence
  n-mer motif
RGDATEM

SEQ ID NO: 1674 - protein, 7 aa, Artificial Sequence
  n-mer motif
YRGREDW

SEQ ID NO: 1675 - protein, 7 aa, Artificial Sequence
  n-mer motif
SLQQSQL

SEQ ID NO: 1676 - protein, 7 aa, Artificial Sequence
  n-mer motif
KPTANDW

SEQ ID NO: 1677 - protein, 7 aa, Artificial Sequence
  n-mer motif
RLTDTMH

SEQ ID NO: 1678 - protein, 7 aa, Artificial Sequence
  n-mer motif
LHGNYSP

SEQ ID NO: 1679 - protein, 7 aa, Artificial Sequence
  n-mer motif
IPVGAMA

SEQ ID NO: 1680 - protein, 7 aa, Artificial Sequence
  n-mer motif
PNTASNF

SEQ ID NO: 1681 - protein, 7 aa, Artificial Sequence
  n-mer motif
TSREVKG

SEQ ID NO: 1682 - protein, 7 aa, Artificial Sequence
  n-mer motif
DTSSGNR

SEQ ID NO: 1683 - protein, 7 aa, Artificial Sequence
  n-mer motif
EAVTSKW

SEQ ID NO: 1684 - protein, 7 aa, Artificial Sequence
  n-mer motif
LITATTN

SEQ ID NO: 1685 - protein, 7 aa, Artificial Sequence
  n-mer motif
DGGRSGI

SEQ ID NO: 1686 - protein, 7 aa, Artificial Sequence
  n-mer motif
FMEVMKN

SEQ ID NO: 1687 - protein, 7 aa, Artificial Sequence
  n-mer motif
SYQNPPP

SEQ ID NO: 1688 - protein, 7 aa, Artificial Sequence
  n-mer motif
TNVTFKL

SEQ ID NO: 1689 - protein, 7 aa, Artificial Sequence
  n-mer motif
ISTHTMT

SEQ ID NO: 1690 - protein, 7 aa, Artificial Sequence
  n-mer motif
ETQGARY

SEQ ID NO: 1691 - protein, 7 aa, Artificial Sequence
  n-mer motif
AAYEHAP

SEQ ID NO: 1692 - protein, 7 aa, Artificial Sequence
  n-mer motif
STNDRAL

SEQ ID NO: 1693 - protein, 7 aa, Artificial Sequence
  n-mer motif
FTERALQ

SEQ ID NO: 1694 - protein, 7 aa, Artificial Sequence
  n-mer motif
VAGLVDI

SEQ ID NO: 1695 - protein, 7 aa, Artificial Sequence
  n-mer motif
SSVTNLA

SEQ ID NO: 1696 - protein, 7 aa, Artificial Sequence
  n-mer motif
DTTTGHL

SEQ ID NO: 1697 - protein, 7 aa, Artificial Sequence
  n-mer motif
TRNLSES

SEQ ID NO: 1698 - protein, 7 aa, Artificial Sequence
  n-mer motif
QVNVGPG

SEQ ID NO: 1699 - protein, 7 aa, Artificial Sequence
  n-mer motif
KQTMSDT

SEQ ID NO: 1700 - protein, 7 aa, Artificial Sequence
  n-mer motif
MSTTSKT

SEQ ID NO: 1701 - protein, 7 aa, Artificial Sequence
  n-mer motif
TTIGTNQ

SEQ ID NO: 1702 - protein, 7 aa, Artificial Sequence
  n-mer motif
GTLTPNL

SEQ ID NO: 1703 - protein, 7 aa, Artificial Sequence
  n-mer motif
FDSYNIV

SEQ ID NO: 1704 - protein, 7 aa, Artificial Sequence
  n-mer motif
RGAPEQA

SEQ ID NO: 1705 - protein, 7 aa, Artificial Sequence
  n-mer motif
IENVNHL

SEQ ID NO: 1706 - protein, 7 aa, Artificial Sequence
  n-mer motif
RSLESQA

SEQ ID NO: 1707 - protein, 7 aa, Artificial Sequence
  n-mer motif
QYTSLSP

SEQ ID NO: 1708 - protein, 7 aa, Artificial Sequence
  n-mer motif
TKGYNDL

SEQ ID NO: 1709 - protein, 7 aa, Artificial Sequence
  n-mer motif
VASMVHN

SEQ ID NO: 1710 - protein, 7 aa, Artificial Sequence
  n-mer motif
STTHTSA

SEQ ID NO: 1711 - protein, 7 aa, Artificial Sequence
  n-mer motif
LAHPQPN

SEQ ID NO: 1712 - protein, 7 aa, Artificial Sequence
  n-mer motif
SINNIGA

SEQ ID NO: 1713 - protein, 7 aa, Artificial Sequence
  n-mer motif
AIDSIKM

SEQ ID NO: 1714 - protein, 7 aa, Artificial Sequence
  n-mer motif
SMYGQAG

SEQ ID NO: 1715 - protein, 7 aa, Artificial Sequence
  n-mer motif
EYANAKT

SEQ ID NO: 1716 - protein, 7 aa, Artificial Sequence
  n-mer motif
YRASDVA

SEQ ID NO: 1717 - protein, 7 aa, Artificial Sequence
  n-mer motif
VSLESRL

SEQ ID NO: 1718 - protein, 7 aa, Artificial Sequence
  n-mer motif
IETSSRS

SEQ ID NO: 1719 - protein, 7 aa, Artificial Sequence
  n-mer motif
MGVKPEQ

SEQ ID NO: 1720 - protein, 7 aa, Artificial Sequence
  n-mer motif
ALPSRER

SEQ ID NO: 1721 - protein, 7 aa, Artificial Sequence
  n-mer motif
GTGSSAH

SEQ ID NO: 1722 - protein, 7 aa, Artificial Sequence
  n-mer motif
QTNTNDR

SEQ ID NO: 1723 - protein, 7 aa, Artificial Sequence
  n-mer motif
VLHSVSA

SEQ ID NO: 1724 - protein, 7 aa, Artificial Sequence
  n-mer motif
PYSATDR

SEQ ID NO: 1725 - protein, 7 aa, Artificial Sequence
  n-mer motif
ANSGLHN

SEQ ID NO: 1726 - protein, 7 aa, Artificial Sequence
  n-mer motif
YESTHVN

SEQ ID NO: 1727 - protein, 7 aa, Artificial Sequence
  n-mer motif
NNALVGS

SEQ ID NO: 1728 - protein, 7 aa, Artificial Sequence
  n-mer motif
GINSSHI

SEQ ID NO: 1729 - protein, 7 aa, Artificial Sequence
  n-mer motif
SISDKNQ

SEQ ID NO: 1730 - protein, 7 aa, Artificial Sequence
  n-mer motif
DHQQALA

SEQ ID NO: 1731 - protein, 7 aa, Artificial Sequence
  n-mer motif
DSTKAMQ

SEQ ID NO: 1732 - protein, 7 aa, Artificial Sequence
  n-mer motif
TITSQSV

SEQ ID NO: 1733 - protein, 7 aa, Artificial Sequence
  n-mer motif
GARTILD

SEQ ID NO: 1734 - protein, 7 aa, Artificial Sequence
  n-mer motif
EHSPTTG

SEQ ID NO: 1735 - protein, 7 aa, Artificial Sequence
  n-mer motif
GLTGYPM

SEQ ID NO: 1736 - protein, 7 aa, Artificial Sequence
  n-mer motif
TMESGRH

SEQ ID NO: 1737 - protein, 7 aa, Artificial Sequence
  n-mer motif
SASKVEY

SEQ ID NO: 1738 - protein, 7 aa, Artificial Sequence
  n-mer motif
DKSNYSI

SEQ ID NO: 1739 - protein, 7 aa, Artificial Sequence
  n-mer motif
FNETAGR

SEQ ID NO: 1740 - protein, 7 aa, Artificial Sequence
  n-mer motif
QKSETYT

SEQ ID NO: 1741 - protein, 7 aa, Artificial Sequence
  n-mer motif
ALTRMPN

SEQ ID NO: 1742 - protein, 7 aa, Artificial Sequence
  n-mer motif
RNGSAQS

SEQ ID NO: 1743 - protein, 7 aa, Artificial Sequence
  n-mer motif
ARDTPGI

SEQ ID NO: 1744 - protein, 7 aa, Artificial Sequence
  n-mer motif
IVNAEIY

SEQ ID NO: 1745 - protein, 7 aa, Artificial Sequence
  n-mer motif
RQGDLKE

SEQ ID NO: 1746 - protein, 7 aa, Artificial Sequence
  n-mer motif
RNNPSHD

SEQ ID NO: 1747 - protein, 7 aa, Artificial Sequence
  n-mer motif
LAHNYLS

SEQ ID NO: 1748 - protein, 7 aa, Artificial Sequence
  n-mer motif
NTHNLQM

SEQ ID NO: 1749 - protein, 7 aa, Artificial Sequence
  n-mer motif
RGDHSTQ

SEQ ID NO: 1750 - protein, 7 aa, Artificial Sequence
  n-mer motif
LHGVSSI

SEQ ID NO: 1751 - protein, 7 aa, Artificial Sequence
  n-mer motif
GINHVAS

SEQ ID NO: 1752 - protein, 7 aa, Artificial Sequence
  n-mer motif
TDKLQGV

SEQ ID NO: 1753 - protein, 7 aa, Artificial Sequence
  n-mer motif
GTSIDYV

SEQ ID NO: 1754 - protein, 7 aa, Artificial Sequence
  n-mer motif
SNTAPPP

SEQ ID NO: 1755 - protein, 7 aa, Artificial Sequence
  n-mer motif
TAKSYGP

SEQ ID NO: 1756 - protein, 7 aa, Artificial Sequence
  n-mer motif
DHQQALA

SEQ ID NO: 1757 - protein, 7 aa, Artificial Sequence
  n-mer motif
TQVVART

SEQ ID NO: 1758 - protein, 7 aa, Artificial Sequence
  n-mer motif
SPPSTSG

SEQ ID NO: 1759 - protein, 7 aa, Artificial Sequence
  n-mer motif
PMRTPPY

SEQ ID NO: 1760 - protein, 7 aa, Artificial Sequence
  n-mer motif
AAGNTTR

SEQ ID NO: 1761 - protein, 6 aa, Artificial Sequence
  n-mer motif
RGDSTP

SEQ ID NO: 1762 - protein, 7 aa, Artificial Sequence
  n-mer motif
LAKTVAI

SEQ ID NO: 1763 - protein, 7 aa, Artificial Sequence
  n-mer motif
SKSENLQ

SEQ ID NO: 1764 - protein, 7 aa, Artificial Sequence
  n-mer motif
TQTSYAT

SEQ ID NO: 1765 - protein, 7 aa, Artificial Sequence
  n-mer motif
TGDRTSV

SEQ ID NO: 1766 - protein, 7 aa, Artificial Sequence
  n-mer motif
ISQGSSL

SEQ ID NO: 1767 - protein, 7 aa, Artificial Sequence
  n-mer motif
LVQMGSV

SEQ ID NO: 1768 - protein, 7 aa, Artificial Sequence
  n-mer motif
LSATSTM

SEQ ID NO: 1769 - protein, 7 aa, Artificial Sequence
  n-mer motif
QNHNELK

SEQ ID NO: 1770 - protein, 7 aa, Artificial Sequence
  n-mer motif
RGAPEHA

SEQ ID NO: 1771 - protein, 7 aa, Artificial Sequence
  n-mer motif
SSFGKDN

SEQ ID NO: 1772 - protein, 7 aa, Artificial Sequence
  n-mer motif
NANAGGN

SEQ ID NO: 1773 - protein, 7 aa, Artificial Sequence
  n-mer motif
DHHPQSR

SEQ ID NO: 1774 - protein, 7 aa, Artificial Sequence
  n-mer motif
MRHEAPL

SEQ ID NO: 1775 - protein, 7 aa, Artificial Sequence
  n-mer motif
KGDGAYE

SEQ ID NO: 1776 - protein, 7 aa, Artificial Sequence
  n-mer motif
PMNGILL

SEQ ID NO: 1777 - protein, 7 aa, Artificial Sequence
  n-mer motif
SSGGMKA

SEQ ID NO: 1778 - protein, 7 aa, Artificial Sequence
  n-mer motif
VLVTQNH

SEQ ID NO: 1779 - protein, 7 aa, Artificial Sequence
  n-mer motif
EINNRTG

SEQ ID NO: 1780 - protein, 7 aa, Artificial Sequence
  n-mer motif
LPTGVLP

SEQ ID NO: 1781 - protein, 7 aa, Artificial Sequence
  n-mer motif
AYGIREV

SEQ ID NO: 1782 - protein, 7 aa, Artificial Sequence
  n-mer motif
STNSIGA

SEQ ID NO: 1783 - protein, 7 aa, Artificial Sequence
  n-mer motif
VQLTHNG

SEQ ID NO: 1784 - protein, 7 aa, Artificial Sequence
  n-mer motif
VQLENAN

SEQ ID NO: 1785 - protein, 7 aa, Artificial Sequence
  n-mer motif
GKANDGS

SEQ ID NO: 1786 - protein, 7 aa, Artificial Sequence
  n-mer motif
TGVRETI

SEQ ID NO: 1787 - protein, 7 aa, Artificial Sequence
  n-mer motif
GLNQITS

SEQ ID NO: 1788 - protein, 7 aa, Artificial Sequence
  n-mer motif
TEKASPL

SEQ ID NO: 1789 - protein, 7 aa, Artificial Sequence
  n-mer motif
FLEGVAQ

SEQ ID NO: 1790 - protein, 7 aa, Artificial Sequence
  n-mer motif
TNYNIGP

SEQ ID NO: 1791 - protein, 7 aa, Artificial Sequence
  n-mer motif
RGDLTTT

SEQ ID NO: 1792 - protein, 7 aa, Artificial Sequence
  n-mer motif
MMNVSGH

SEQ ID NO: 1793 - protein, 7 aa, Artificial Sequence
  n-mer motif
SQSINGL

SEQ ID NO: 1794 - protein, 7 aa, Artificial Sequence
  n-mer motif
LTTLTNH

SEQ ID NO: 1795 - protein, 7 aa, Artificial Sequence
  n-mer motif
NSVQSTP

SEQ ID NO: 1796 - protein, 7 aa, Artificial Sequence
  n-mer motif
YNTDRTN

SEQ ID NO: 1797 - protein, 7 aa, Artificial Sequence
  n-mer motif
EKPQHNS

SEQ ID NO: 1798 - protein, 7 aa, Artificial Sequence
  n-mer motif
TMATNLS

SEQ ID NO: 1799 - protein, 7 aa, Artificial Sequence
  n-mer motif
VGTHLHS

SEQ ID NO: 1800 - protein, 7 aa, Artificial Sequence
  n-mer motif
DAHHSSS

SEQ ID NO: 1801 - protein, 7 aa, Artificial Sequence
  n-mer motif
LVGTLVY

SEQ ID NO: 1802 - protein, 7 aa, Artificial Sequence
  n-mer motif
YGVQANS

SEQ ID NO: 1803 - protein, 7 aa, Artificial Sequence
  n-mer motif
VLSDKAY

SEQ ID NO: 1804 - protein, 7 aa, Artificial Sequence
  n-mer motif
LEGQNKT

SEQ ID NO: 1805 - protein, 7 aa, Artificial Sequence
  n-mer motif
EVSNNNY

SEQ ID NO: 1806 - protein, 7 aa, Artificial Sequence
  n-mer motif
AHQQALA

SEQ ID NO: 1807 - protein, 7 aa, Artificial Sequence
  n-mer motif
LPTTLNH

SEQ ID NO: 1808 - protein, 7 aa, Artificial Sequence
  n-mer motif
YIAGGEQ

SEQ ID NO: 1809 - protein, 7 aa, Artificial Sequence
  n-mer motif
NSGTLYQ

SEQ ID NO: 1810 - protein, 7 aa, Artificial Sequence
  n-mer motif
RGLPDVN

SEQ ID NO: 1811 - protein, 7 aa, Artificial Sequence
  n-mer motif
NQQLSHS

SEQ ID NO: 1812 - protein, 7 aa, Artificial Sequence
  n-mer motif
NPSYDHR

SEQ ID NO: 1813 - protein, 7 aa, Artificial Sequence
  n-mer motif
IDSDTFV

SEQ ID NO: 1814 - protein, 7 aa, Artificial Sequence
  n-mer motif
TAYLAGL

SEQ ID NO: 1815 - protein, 7 aa, Artificial Sequence
  n-mer motif
HSNVSLE

SEQ ID NO: 1816 - protein, 7 aa, Artificial Sequence
  n-mer motif
GNNLSLS

SEQ ID NO: 1817 - protein, 7 aa, Artificial Sequence
  n-mer motif
VMDTHGM

SEQ ID NO: 1818 - protein, 7 aa, Artificial Sequence
  n-mer motif
AYNMSSV

SEQ ID NO: 1819 - protein, 7 aa, Artificial Sequence
  n-mer motif
TNAISQT

SEQ ID NO: 1820 - protein, 7 aa, Artificial Sequence
  n-mer motif
ATHAMRP

SEQ ID NO: 1821 - protein, 7 aa, Artificial Sequence
  n-mer motif
MLNNTMM

SEQ ID NO: 1822 - protein, 7 aa, Artificial Sequence
  n-mer motif
ISSGILS

SEQ ID NO: 1823 - protein, 7 aa, Artificial Sequence
  n-mer motif
RQGSLMI

SEQ ID NO: 1824 - protein, 7 aa, Artificial Sequence
  n-mer motif
TTDKGIN

SEQ ID NO: 1825 - protein, 7 aa, Artificial Sequence
  n-mer motif
HNLMTQI

SEQ ID NO: 1826 - protein, 7 aa, Artificial Sequence
  n-mer motif
NQNTYEL

SEQ ID NO: 1827 - protein, 7 aa, Artificial Sequence
  n-mer motif
ANTVTER

SEQ ID NO: 1828 - protein, 7 aa, Artificial Sequence
  n-mer motif
STLQTNG

SEQ ID NO: 1829 - protein, 7 aa, Artificial Sequence
  n-mer motif
PNEYKAP

SEQ ID NO: 1830 - protein, 7 aa, Artificial Sequence
  n-mer motif
MQTRSDT

SEQ ID NO: 1831 - protein, 7 aa, Artificial Sequence
  n-mer motif
GTGYAGS

SEQ ID NO: 1832 - protein, 7 aa, Artificial Sequence
  n-mer motif
MGMQNTH

SEQ ID NO: 1833 - protein, 7 aa, Artificial Sequence
  n-mer motif
SSKERTS

SEQ ID NO: 1834 - protein, 7 aa, Artificial Sequence
  n-mer motif
RTDTPYT

SEQ ID NO: 1835 - protein, 7 aa, Artificial Sequence
  n-mer motif
TALRDNK

SEQ ID NO: 1836 - protein, 7 aa, Artificial Sequence
  n-mer motif
RMSESSD

SEQ ID NO: 1837 - protein, 7 aa, Artificial Sequence
  n-mer motif
NQSISMD

SEQ ID NO: 1838 - protein, 7 aa, Artificial Sequence
  n-mer motif
SLGHSNN

SEQ ID NO: 1839 - protein, 7 aa, Artificial Sequence
  n-mer motif
LNSGGAM

SEQ ID NO: 1840 - protein, 7 aa, Artificial Sequence
  n-mer motif
NEQFEKV

SEQ ID NO: 1841 - protein, 7 aa, Artificial Sequence
  n-mer motif
MMANNMQ

SEQ ID NO: 1842 - protein, 7 aa, Artificial Sequence
  n-mer motif
SRREEQP

SEQ ID NO: 1843 - protein, 7 aa, Artificial Sequence
  n-mer motif
ATMTSST

SEQ ID NO: 1844 - protein, 7 aa, Artificial Sequence
  n-mer motif
RGSDGGL

SEQ ID NO: 1845 - protein, 7 aa, Artificial Sequence
  n-mer motif
SLTPNNL

SEQ ID NO: 1846 - protein, 7 aa, Artificial Sequence
  n-mer motif
ATLSPHA

SEQ ID NO: 1847 - protein, 7 aa, Artificial Sequence
  n-mer motif
YLQEKFP

SEQ ID NO: 1848 - protein, 7 aa, Artificial Sequence
  n-mer motif
GTGYPNQ

SEQ ID NO: 1849 - protein, 7 aa, Artificial Sequence
  n-mer motif
NYPSVQE

SEQ ID NO: 1850 - protein, 7 aa, Artificial Sequence
  n-mer motif
TDASGRS

SEQ ID NO: 1851 - protein, 7 aa, Artificial Sequence
  n-mer motif
RVITAGD

SEQ ID NO: 1852 - protein, 7 aa, Artificial Sequence
  n-mer motif
VTVSNSL

SEQ ID NO: 1853 - protein, 7 aa, Artificial Sequence
  n-mer motif
LLTAPHR

SEQ ID NO: 1854 - protein, 7 aa, Artificial Sequence
  n-mer motif
SIANHMI

SEQ ID NO: 1855 - protein, 7 aa, Artificial Sequence
  n-mer motif
MPSKGEV

SEQ ID NO: 1856 - protein, 7 aa, Artificial Sequence
  n-mer motif
NMTNERL

SEQ ID NO: 1857 - protein, 7 aa, Artificial Sequence
  n-mer motif
SFSSGIM

SEQ ID NO: 1858 - protein, 7 aa, Artificial Sequence
  n-mer motif
RDRQDSV

SEQ ID NO: 1859 - protein, 7 aa, Artificial Sequence
  n-mer motif
HGDRTAL

SEQ ID NO: 1860 - protein, 7 aa, Artificial Sequence
  n-mer motif
EVRGSVP

SEQ ID NO: 1861 - protein, 7 aa, Artificial Sequence
  n-mer motif
LISTGNN

SEQ ID NO: 1862 - protein, 7 aa, Artificial Sequence
  n-mer motif
PTSGDKP

SEQ ID NO: 1863 - protein, 7 aa, Artificial Sequence
  n-mer motif
KADHSGA

SEQ ID NO: 1864 - protein, 7 aa, Artificial Sequence
  n-mer motif
LNDVYRK

SEQ ID NO: 1865 - protein, 7 aa, Artificial Sequence
  n-mer motif
NSLQASA

SEQ ID NO: 1866 - protein, 7 aa, Artificial Sequence
  n-mer motif
YHNEIMT

SEQ ID NO: 1867 - protein, 7 aa, Artificial Sequence
  n-mer motif
NNTLNIL

SEQ ID NO: 1868 - protein, 7 aa, Artificial Sequence
  n-mer motif
SYGQGLE

SEQ ID NO: 1869 - protein, 7 aa, Artificial Sequence
  n-mer motif
MIKTNML

SEQ ID NO: 1870 - protein, 7 aa, Artificial Sequence
  n-mer motif
TEAGRPQ

SEQ ID NO: 1871 - protein, 7 aa, Artificial Sequence
  n-mer motif
RIDQTNV

SEQ ID NO: 1872 - protein, 7 aa, Artificial Sequence
  n-mer motif
EGHNRGI

SEQ ID NO: 1873 - protein, 7 aa, Artificial Sequence
  n-mer motif
MGTEYRM

SEQ ID NO: 1874 - protein, 7 aa, Artificial Sequence
  n-mer motif
SGMNSNK

SEQ ID NO: 1875 - protein, 7 aa, Artificial Sequence
  n-mer motif
LTNDNKL

SEQ ID NO: 1876 - protein, 7 aa, Artificial Sequence
  n-mer motif
LHNYQDR

SEQ ID NO: 1877 - protein, 7 aa, Artificial Sequence
  n-mer motif
KSNLEGK

SEQ ID NO: 1878 - protein, 7 aa, Artificial Sequence
  n-mer motif
LTGQNAI

SEQ ID NO: 1879 - protein, 7 aa, Artificial Sequence
  n-mer motif
HTVGAMH

SEQ ID NO: 1880 - protein, 7 aa, Artificial Sequence
  n-mer motif
LQLATSH

SEQ ID NO: 1881 - protein, 7 aa, Artificial Sequence
  n-mer motif
SLNGVLV

SEQ ID NO: 1882 - protein, 7 aa, Artificial Sequence
  n-mer motif
SHNQVNV

SEQ ID NO: 1883 - protein, 7 aa, Artificial Sequence
  n-mer motif
SLSTDVF

SEQ ID NO: 1884 - protein, 7 aa, Artificial Sequence
  n-mer motif
MVGRAEI

SEQ ID NO: 1885 - protein, 7 aa, Artificial Sequence
  n-mer motif
LSSMSTD

SEQ ID NO: 1886 - protein, 7 aa, Artificial Sequence
  n-mer motif
SYSTSTP

SEQ ID NO: 1887 - protein, 7 aa, Artificial Sequence
  n-mer motif
SELMVRP

SEQ ID NO: 1888 - protein, 7 aa, Artificial Sequence
  n-mer motif
WNGNATQ

SEQ ID NO: 1889 - protein, 7 aa, Artificial Sequence
  n-mer motif
MDTELYR

SEQ ID NO: 1890 - protein, 7 aa, Artificial Sequence
  n-mer motif
RTSPDTN

SEQ ID NO: 1891 - protein, 7 aa, Artificial Sequence
  n-mer motif
FSTQDIS

SEQ ID NO: 1892 - protein, 7 aa, Artificial Sequence
  n-mer motif
TTVLGNN

SEQ ID NO: 1893 - protein, 7 aa, Artificial Sequence
  n-mer motif
QRDAAYA

SEQ ID NO: 1894 - protein, 7 aa, Artificial Sequence
  n-mer motif
HQTVVPT

SEQ ID NO: 1895 - protein, 7 aa, Artificial Sequence
  n-mer motif
SNPGNHN

SEQ ID NO: 1896 - protein, 7 aa, Artificial Sequence
  n-mer motif
WETMAKP

SEQ ID NO: 1897 - protein, 7 aa, Artificial Sequence
  n-mer motif
GLYQNPT

SEQ ID NO: 1898 - protein, 7 aa, Artificial Sequence
  n-mer motif
LNLTNHN

SEQ ID NO: 1899 - protein, 7 aa, Artificial Sequence
  n-mer motif
MSLASTQ

SEQ ID NO: 1900 - protein, 7 aa, Artificial Sequence
  n-mer motif
TSQTVRV

SEQ ID NO: 1901 - protein, 7 aa, Artificial Sequence
  n-mer motif
GATVNTR

SEQ ID NO: 1902 - protein, 7 aa, Artificial Sequence
  n-mer motif
KGGNLTA

SEQ ID NO: 1903 - protein, 7 aa, Artificial Sequence
  n-mer motif
AWSQVLT

SEQ ID NO: 1904 - protein, 7 aa, Artificial Sequence
  n-mer motif
VEHVAHQ

SEQ ID NO: 1905 - protein, 7 aa, Artificial Sequence
  n-mer motif
LMSSYSS

SEQ ID NO: 1906 - protein, 7 aa, Artificial Sequence
  n-mer motif
SLGGNPP

SEQ ID NO: 1907 - protein, 7 aa, Artificial Sequence
  n-mer motif
KNENTNY

SEQ ID NO: 1908 - protein, 7 aa, Artificial Sequence
  n-mer motif
ILDNHRF

SEQ ID NO: 1909 - protein, 7 aa, Artificial Sequence
  n-mer motif
NSSHVNS

SEQ ID NO: 1910 - protein, 7 aa, Artificial Sequence
  n-mer motif
QVQHERV

SEQ ID NO: 1911 - protein, 7 aa, Artificial Sequence
  n-mer motif
LGGTLGI

SEQ ID NO: 1912 - protein, 7 aa, Artificial Sequence
  n-mer motif
TQERPLI

SEQ ID NO: 1913 - protein, 7 aa, Artificial Sequence
  n-mer motif
RKTEDRM

SEQ ID NO: 1914 - protein, 7 aa, Artificial Sequence
  n-mer motif
TELTARN

SEQ ID NO: 1915 - protein, 7 aa, Artificial Sequence
  n-mer motif
RGDNTYS

SEQ ID NO: 1916 - protein, 7 aa, Artificial Sequence
  n-mer motif
QSNTNNS

SEQ ID NO: 1917 - protein, 7 aa, Artificial Sequence
  n-mer motif
ASYSISD

SEQ ID NO: 1918 - protein, 7 aa, Artificial Sequence
  n-mer motif
SEHHAGI

SEQ ID NO: 1919 - protein, 7 aa, Artificial Sequence
  n-mer motif
RGAPEHA

SEQ ID NO: 1920 - protein, 7 aa, Artificial Sequence
  n-mer motif
NFSSGDV

SEQ ID NO: 1921 - protein, 7 aa, Artificial Sequence
  n-mer motif
SGINATD

SEQ ID NO: 1922 - protein, 7 aa, Artificial Sequence
  n-mer motif
RADVSWS

SEQ ID NO: 1923 - protein, 7 aa, Artificial Sequence
  n-mer motif
CMDVGKA

SEQ ID NO: 1924 - protein, 7 aa, Artificial Sequence
  n-mer motif
GVGATSV

SEQ ID NO: 1925 - protein, 7 aa, Artificial Sequence
  n-mer motif
KNNNSDS

SEQ ID NO: 1926 - protein, 7 aa, Artificial Sequence
  n-mer motif
NVASIDR

SEQ ID NO: 1927 - protein, 7 aa, Artificial Sequence
  n-mer motif
NSVNGLL

SEQ ID NO: 1928 - protein, 7 aa, Artificial Sequence
  n-mer motif
TLDRNQT

SEQ ID NO: 1929 - protein, 7 aa, Artificial Sequence
  n-mer motif
DQNFERR

SEQ ID NO: 1930 - protein, 7 aa, Artificial Sequence
  n-mer motif
VGDRNLV

SEQ ID NO: 1931 - protein, 7 aa, Artificial Sequence
  n-mer motif
LEVNLQT

SEQ ID NO: 1932 - protein, 7 aa, Artificial Sequence
  n-mer motif
TNGGSLN

SEQ ID NO: 1933 - protein, 7 aa, Artificial Sequence
  n-mer motif
FTRTPVT

SEQ ID NO: 1934 - protein, 7 aa, Artificial Sequence
  n-mer motif
TPAESKV

SEQ ID NO: 1935 - protein, 7 aa, Artificial Sequence
  n-mer motif
FPSHNGA

SEQ ID NO: 1936 - protein, 7 aa, Artificial Sequence
  n-mer motif
ARNVMLG

SEQ ID NO: 1937 - protein, 7 aa, Artificial Sequence
  n-mer motif
TIQDHIK

SEQ ID NO: 1938 - protein, 7 aa, Artificial Sequence
  n-mer motif
INSYLHE

SEQ ID NO: 1939 - protein, 7 aa, Artificial Sequence
  n-mer motif
AHDVTVN

SEQ ID NO: 1940 - protein, 7 aa, Artificial Sequence
  n-mer motif
TVGVQQT

SEQ ID NO: 1941 - protein, 7 aa, Artificial Sequence
  n-mer motif
TGSSDRL

SEQ ID NO: 1942 - protein, 7 aa, Artificial Sequence
  n-mer motif
NHDTAHA

SEQ ID NO: 1943 - protein, 7 aa, Artificial Sequence
  n-mer motif
AESQLAS

SEQ ID NO: 1944 - protein, 7 aa, Artificial Sequence
  n-mer motif
GNAYNTT

SEQ ID NO: 1945 - protein, 7 aa, Artificial Sequence
  n-mer motif
NHQAGTT

SEQ ID NO: 1946 - protein, 7 aa, Artificial Sequence
  n-mer motif
TVGENHR

SEQ ID NO: 1947 - protein, 7 aa, Artificial Sequence
  n-mer motif
LTTKIPL

SEQ ID NO: 1948 - protein, 7 aa, Artificial Sequence
  n-mer motif
TNYPEAN

SEQ ID NO: 1949 - protein, 7 aa, Artificial Sequence
  n-mer motif
NTAPPNH

SEQ ID NO: 1950 - protein, 7 aa, Artificial Sequence
  n-mer motif
VLSTGLR

SEQ ID NO: 1951 - protein, 7 aa, Artificial Sequence
  n-mer motif
LTSHSAG

SEQ ID NO: 1952 - protein, 7 aa, Artificial Sequence
  n-mer motif
MNKHGVL

SEQ ID NO: 1953 - protein, 7 aa, Artificial Sequence
  n-mer motif
DLTRAAI

SEQ ID NO: 1954 - protein, 7 aa, Artificial Sequence
  n-mer motif
YIVDHAN

SEQ ID NO: 1955 - protein, 7 aa, Artificial Sequence
  n-mer motif
SGPENTL

SEQ ID NO: 1956 - protein, 7 aa, Artificial Sequence
  n-mer motif
RYGDTGM

SEQ ID NO: 1957 - protein, 7 aa, Artificial Sequence
  n-mer motif
DGKNSYA

SEQ ID NO: 1958 - protein, 7 aa, Artificial Sequence
  n-mer motif
EAHNRVI

SEQ ID NO: 1959 - protein, 7 aa, Artificial Sequence
  n-mer motif
SLQAGRM

SEQ ID NO: 1960 - protein, 7 aa, Artificial Sequence
  n-mer motif
DAKALTT

SEQ ID NO: 1961 - protein, 7 aa, Artificial Sequence
  n-mer motif
TDTRKND

SEQ ID NO: 1962 - protein, 7 aa, Artificial Sequence
  n-mer motif
DSSHYST

SEQ ID NO: 1963 - protein, 7 aa, Artificial Sequence
  n-mer motif
TMHLPNL

SEQ ID NO: 1964 - protein, 7 aa, Artificial Sequence
  n-mer motif
RDGSTKV

SEQ ID NO: 1965 - protein, 7 aa, Artificial Sequence
  n-mer motif
SGYQMTE

SEQ ID NO: 1966 - protein, 7 aa, Artificial Sequence
  n-mer motif
CDLSQSC

SEQ ID NO: 1967 - protein, 7 aa, Artificial Sequence
  n-mer motif
RNASNGV

SEQ ID NO: 1968 - protein, 7 aa, Artificial Sequence
  n-mer motif
QSQNVTQ

SEQ ID NO: 1969 - protein, 7 aa, Artificial Sequence
  n-mer motif
DSAPSTI

SEQ ID NO: 1970 - protein, 7 aa, Artificial Sequence
  n-mer motif
RSVPSPH

SEQ ID NO: 1971 - protein, 7 aa, Artificial Sequence
  n-mer motif
MTSASRG

SEQ ID NO: 1972 - protein, 7 aa, Artificial Sequence
  n-mer motif
ALASRPM

SEQ ID NO: 1973 - protein, 7 aa, Artificial Sequence
  n-mer motif
LNLSNDW

SEQ ID NO: 1974 - protein, 7 aa, Artificial Sequence
  n-mer motif
VSTAQRQ

SEQ ID NO: 1975 - protein, 7 aa, Artificial Sequence
  n-mer motif
HADVGMS

SEQ ID NO: 1976 - protein, 7 aa, Artificial Sequence
  n-mer motif
AGGLLSR

SEQ ID NO: 1977 - protein, 7 aa, Artificial Sequence
  n-mer motif
HLSQANH

SEQ ID NO: 1978 - protein, 7 aa, Artificial Sequence
  n-mer motif
VHNPTTT

SEQ ID NO: 1979 - protein, 7 aa, Artificial Sequence
  n-mer motif
SQRNPDD

SEQ ID NO: 1980 - protein, 7 aa, Artificial Sequence
  n-mer motif
RETNNFA

SEQ ID NO: 1981 - protein, 7 aa, Artificial Sequence
  n-mer motif
NAGALMG

SEQ ID NO: 1982 - protein, 7 aa, Artificial Sequence
  n-mer motif
LPKTVNM

SEQ ID NO: 1983 - protein, 7 aa, Artificial Sequence
  n-mer motif
ASDLQMT

SEQ ID NO: 1984 - protein, 7 aa, Artificial Sequence
  n-mer motif
QALATTN

SEQ ID NO: 1985 - protein, 7 aa, Artificial Sequence
  n-mer motif
HESSGYH

SEQ ID NO: 1986 - protein, 7 aa, Artificial Sequence
  n-mer motif
GVNDRAR

SEQ ID NO: 1987 - protein, 7 aa, Artificial Sequence
  n-mer motif
PRDALRT

SEQ ID NO: 1988 - protein, 7 aa, Artificial Sequence
  n-mer motif
NDSSSMS

SEQ ID NO: 1989 - protein, 7 aa, Artificial Sequence
  n-mer motif
EYNTRHD

SEQ ID NO: 1990 - protein, 7 aa, Artificial Sequence
  n-mer motif
ASPAHTS

SEQ ID NO: 1991 - protein, 7 aa, Artificial Sequence
  n-mer motif
QNSNTPS

SEQ ID NO: 1992 - protein, 7 aa, Artificial Sequence
  n-mer motif
LAKLGNY

SEQ ID NO: 1993 - protein, 7 aa, Artificial Sequence
  n-mer motif
ASDRQSG

SEQ ID NO: 1994 - protein, 7 aa, Artificial Sequence
  n-mer motif
YQNGVLP

SEQ ID NO: 1995 - protein, 7 aa, Artificial Sequence
  n-mer motif
NKFGYNP

SEQ ID NO: 1996 - protein, 7 aa, Artificial Sequence
  n-mer motif
KKTNGIP

SEQ ID NO: 1997 - protein, 7 aa, Artificial Sequence
  n-mer motif
VNDNRGN

SEQ ID NO: 1998 - protein, 7 aa, Artificial Sequence
  n-mer motif
MHTITGS

SEQ ID NO: 1999 - protein, 7 aa, Artificial Sequence
  n-mer motif
IDGVQKL

SEQ ID NO: 2000 - protein, 7 aa, Artificial Sequence
  n-mer motif
AQVNNHD

SEQ ID NO: 2001 - protein, 7 aa, Artificial Sequence
  n-mer motif
VSSPNGT

SEQ ID NO: 2002 - protein, 7 aa, Artificial Sequence
  n-mer motif
DSAPRAI

SEQ ID NO: 2003 - protein, 7 aa, Artificial Sequence
  n-mer motif
SASDSQH

SEQ ID NO: 2004 - protein, 7 aa, Artificial Sequence
  n-mer motif
SAHQTPT

SEQ ID NO: 2005 - protein, 7 aa, Artificial Sequence
  n-mer motif
ATLNNSY

SEQ ID NO: 2006 - protein, 7 aa, Artificial Sequence
  n-mer motif
EDSMRFS

SEQ ID NO: 2007 - protein, 7 aa, Artificial Sequence
  n-mer motif
ERNGLIE

SEQ ID NO: 2008 - protein, 7 aa, Artificial Sequence
  n-mer motif
LVLDSRN

SEQ ID NO: 2009 - protein, 7 aa, Artificial Sequence
  n-mer motif
TVEQINS

SEQ ID NO: 2010 - protein, 7 aa, Artificial Sequence
  n-mer motif
GTGTVGW

SEQ ID NO: 2011 - protein, 7 aa, Artificial Sequence
  n-mer motif
NQQRIDN

SEQ ID NO: 2012 - protein, 7 aa, Artificial Sequence
  n-mer motif
IQNGVLP

SEQ ID NO: 2013 - protein, 7 aa, Artificial Sequence
  n-mer motif
GDISSRN

SEQ ID NO: 2014 - protein, 7 aa, Artificial Sequence
  n-mer motif
VTGTTPG

SEQ ID NO: 2015 - protein, 7 aa, Artificial Sequence
  n-mer motif
TRESMSI

SEQ ID NO: 2016 - protein, 7 aa, Artificial Sequence
  n-mer motif
HTYSQAD

SEQ ID NO: 2017 - protein, 7 aa, Artificial Sequence
  n-mer motif
SNMGVAS

SEQ ID NO: 2018 - protein, 7 aa, Artificial Sequence
  n-mer motif
HDLNHGK

SEQ ID NO: 2019 - protein, 7 aa, Artificial Sequence
  n-mer motif
LYGGAHQ

SEQ ID NO: 2020 - protein, 7 aa, Artificial Sequence
  n-mer motif
NVYGDGI

SEQ ID NO: 2021 - protein, 7 aa, Artificial Sequence
  n-mer motif
STINMRA

SEQ ID NO: 2022 - protein, 7 aa, Artificial Sequence
  n-mer motif
KMGSIEV

SEQ ID NO: 2023 - protein, 7 aa, Artificial Sequence
  n-mer motif
SETRAGY

SEQ ID NO: 2024 - protein, 7 aa, Artificial Sequence
  n-mer motif
NVGNTLG

SEQ ID NO: 2025 - protein, 7 aa, Artificial Sequence
  n-mer motif
IGGTDTR

SEQ ID NO: 2026 - protein, 7 aa, Artificial Sequence
  n-mer motif
ADKGFGH

SEQ ID NO: 2027 - protein, 7 aa, Artificial Sequence
  n-mer motif
WQDHNKV

SEQ ID NO: 2028 - protein, 7 aa, Artificial Sequence
  n-mer motif
NYGSGRI

SEQ ID NO: 2029 - protein, 7 aa, Artificial Sequence
  n-mer motif
THKQVDL

SEQ ID NO: 2030 - protein, 7 aa, Artificial Sequence
  n-mer motif
RQNDKGN

SEQ ID NO: 2031 - protein, 7 aa, Artificial Sequence
  n-mer motif
GRNESPE

SEQ ID NO: 2032 - protein, 7 aa, Artificial Sequence
  n-mer motif
VFTGQTE

SEQ ID NO: 2033 - protein, 7 aa, Artificial Sequence
  n-mer motif
YVDRKDN

SEQ ID NO: 2034 - protein, 7 aa, Artificial Sequence
  n-mer motif
NNTLNIL

SEQ ID NO: 2035 - protein, 7 aa, Artificial Sequence
  n-mer motif
LSYSIQH

SEQ ID NO: 2036 - protein, 7 aa, Artificial Sequence
  n-mer motif
ATNRSPL

SEQ ID NO: 2037 - protein, 7 aa, Artificial Sequence
  n-mer motif
VHTADTI

SEQ ID NO: 2038 - protein, 7 aa, Artificial Sequence
  n-mer motif
GHLVNMS

SEQ ID NO: 2039 - protein, 7 aa, Artificial Sequence
  n-mer motif
LDYTPQN

SEQ ID NO: 2040 - protein, 7 aa, Artificial Sequence
  n-mer motif
SASYSRM

SEQ ID NO: 2041 - protein, 7 aa, Artificial Sequence
  n-mer motif
SGAAQNP

SEQ ID NO: 2042 - protein, 7 aa, Artificial Sequence
  n-mer motif
RNTLADL

SEQ ID NO: 2043 - protein, 7 aa, Artificial Sequence
  n-mer motif
GSTVSAQ

SEQ ID NO: 2044 - protein, 7 aa, Artificial Sequence
  n-mer motif
SKDSTMY

SEQ ID NO: 2045 - protein, 7 aa, Artificial Sequence
  n-mer motif
VVVHTIP

SEQ ID NO: 2046 - protein, 7 aa, Artificial Sequence
  n-mer motif
PRTVSLD

SEQ ID NO: 2047 - protein, 7 aa, Artificial Sequence
  n-mer motif
MMKSEEN

SEQ ID NO: 2048 - protein, 7 aa, Artificial Sequence
  n-mer motif
TTDRPNG

SEQ ID NO: 2049 - protein, 7 aa, Artificial Sequence
  n-mer motif
HSPPTTM

SEQ ID NO: 2050 - protein, 7 aa, Artificial Sequence
  n-mer motif
GQWTTGT

SEQ ID NO: 2051 - protein, 7 aa, Artificial Sequence
  n-mer motif
DGMNGVG

SEQ ID NO: 2052 - protein, 7 aa, Artificial Sequence
  n-mer motif
LHTVANE

SEQ ID NO: 2053 - protein, 7 aa, Artificial Sequence
  n-mer motif
YTSQTST

SEQ ID NO: 2054 - protein, 7 aa, Artificial Sequence
  n-mer motif
NFSEMST

SEQ ID NO: 2055 - protein, 7 aa, Artificial Sequence
  n-mer motif
INIRSDL

SEQ ID NO: 2056 - protein, 7 aa, Artificial Sequence
  n-mer motif
PSNSERF

SEQ ID NO: 2057 - protein, 7 aa, Artificial Sequence
  n-mer motif
YTNYGDL

SEQ ID NO: 2058 - protein, 7 aa, Artificial Sequence
  n-mer motif
DKSTAQA

SEQ ID NO: 2059 - protein, 7 aa, Artificial Sequence
  n-mer motif
HTDMVSS

SEQ ID NO: 2060 - protein, 7 aa, Artificial Sequence
  n-mer motif
NKSLSMD

SEQ ID NO: 2061 - protein, 7 aa, Artificial Sequence
  n-mer motif
GHYATNT

SEQ ID NO: 2062 - protein, 7 aa, Artificial Sequence
  n-mer motif
VIVSTKS

SEQ ID NO: 2063 - protein, 7 aa, Artificial Sequence
  n-mer motif
THSLMND

SEQ ID NO: 2064 - protein, 7 aa, Artificial Sequence
  n-mer motif
NYHGDNV

SEQ ID NO: 2065 - protein, 7 aa, Artificial Sequence
  n-mer motif
RDDQQLD

SEQ ID NO: 2066 - protein, 7 aa, Artificial Sequence
  n-mer motif
DDKTGRY

SEQ ID NO: 2067 - protein, 7 aa, Artificial Sequence
  n-mer motif
GSSQHHE

SEQ ID NO: 2068 - protein, 7 aa, Artificial Sequence
  n-mer motif
RVTGVST

SEQ ID NO: 2069 - protein, 7 aa, Artificial Sequence
  n-mer motif
STASGHT

SEQ ID NO: 2070 - protein, 7 aa, Artificial Sequence
  n-mer motif
TNNLSYE

SEQ ID NO: 2071 - protein, 7 aa, Artificial Sequence
  n-mer motif
QHNSASA

SEQ ID NO: 2072 - protein, 7 aa, Artificial Sequence
  n-mer motif
PAKGFGH

SEQ ID NO: 2073 - protein, 7 aa, Artificial Sequence
  n-mer motif
WYETISP

SEQ ID NO: 2074 - protein, 7 aa, Artificial Sequence
  n-mer motif
TDATGRH

SEQ ID NO: 2075 - protein, 7 aa, Artificial Sequence
  n-mer motif
IQAKNSE

SEQ ID NO: 2076 - protein, 7 aa, Artificial Sequence
  n-mer motif
STETRGG

SEQ ID NO: 2077 - protein, 7 aa, Artificial Sequence
  n-mer motif
FSTNSVI

SEQ ID NO: 2078 - protein, 7 aa, Artificial Sequence
  n-mer motif
SNLRNTI

SEQ ID NO: 2079 - protein, 7 aa, Artificial Sequence
  n-mer motif
GMIGHNA

SEQ ID NO: 2080 - protein, 7 aa, Artificial Sequence
  n-mer motif
SGQGFSA

SEQ ID NO: 2081 - protein, 7 aa, Artificial Sequence
  n-mer motif
THNSTGL

SEQ ID NO: 2082 - protein, 7 aa, Artificial Sequence
  n-mer motif
RIDSAMV

SEQ ID NO: 2083 - protein, 7 aa, Artificial Sequence
  n-mer motif
VAMGGGP

SEQ ID NO: 2084 - protein, 7 aa, Artificial Sequence
  n-mer motif
GSHNGPA

SEQ ID NO: 2085 - protein, 7 aa, Artificial Sequence
  n-mer motif
HSAAGDG

SEQ ID NO: 2086 - protein, 7 aa, Artificial Sequence
  n-mer motif
AQGITHA

SEQ ID NO: 2087 - protein, 7 aa, Artificial Sequence
  n-mer motif
SALLRMD

SEQ ID NO: 2088 - protein, 7 aa, Artificial Sequence
  n-mer motif
WQMGAGS

SEQ ID NO: 2089 - protein, 7 aa, Artificial Sequence
  n-mer motif
IDSHASI

SEQ ID NO: 2090 - protein, 7 aa, Artificial Sequence
  n-mer motif
SLDHAPL

SEQ ID NO: 2091 - protein, 7 aa, Artificial Sequence
  n-mer motif
ENNMQHG

SEQ ID NO: 2092 - protein, 7 aa, Artificial Sequence
  n-mer motif
KGAQGVQ

SEQ ID NO: 2093 - protein, 7 aa, Artificial Sequence
  n-mer motif
VAVSNTP

SEQ ID NO: 2094 - protein, 7 aa, Artificial Sequence
  n-mer motif
VESSYSR

SEQ ID NO: 2095 - protein, 7 aa, Artificial Sequence
  n-mer motif
HNTESKT

SEQ ID NO: 2096 - protein, 7 aa, Artificial Sequence
  n-mer motif
NESTKES

SEQ ID NO: 2097 - protein, 7 aa, Artificial Sequence
  n-mer motif
DVYLKSP

SEQ ID NO: 2098 - protein, 7 aa, Artificial Sequence
  n-mer motif
QSGARTL

SEQ ID NO: 2099 - protein, 7 aa, Artificial Sequence
  n-mer motif
SNSQVHN

SEQ ID NO: 2100 - protein, 7 aa, Artificial Sequence
  n-mer motif
VVSSGGW

SEQ ID NO: 2101 - protein, 7 aa, Artificial Sequence
  n-mer motif
PSSFNSA

SEQ ID NO: 2102 - protein, 7 aa, Artificial Sequence
  n-mer motif
KQTDSRG

SEQ ID NO: 2103 - protein, 7 aa, Artificial Sequence
  n-mer motif
NTTPPNH

SEQ ID NO: 2104 - protein, 7 aa, Artificial Sequence
  n-mer motif
QNGTSSI

SEQ ID NO: 2105 - protein, 7 aa, Artificial Sequence
  n-mer motif
LMKDMES

SEQ ID NO: 2106 - protein, 7 aa, Artificial Sequence
  n-mer motif
TQTGHVS

SEQ ID NO: 2107 - protein, 7 aa, Artificial Sequence
  n-mer motif
EIHTTTG

SEQ ID NO: 2108 - protein, 7 aa, Artificial Sequence
  n-mer motif
IQTTTKC

SEQ ID NO: 2109 - protein, 7 aa, Artificial Sequence
  n-mer motif
PAEGNNR

SEQ ID NO: 2110 - protein, 7 aa, Artificial Sequence
  n-mer motif
YIAGGEQ

SEQ ID NO: 2111 - protein, 7 aa, Artificial Sequence
  n-mer motif
EVRDQKT

SEQ ID NO: 2112 - protein, 7 aa, Artificial Sequence
  n-mer motif
YAVAIGT

SEQ ID NO: 2113 - protein, 7 aa, Artificial Sequence
  n-mer motif
SANEHNH

SEQ ID NO: 2114 - protein, 7 aa, Artificial Sequence
  n-mer motif
GMRDTPP

SEQ ID NO: 2115 - protein, 7 aa, Artificial Sequence
  n-mer motif
AQQIVNG

SEQ ID NO: 2116 - protein, 7 aa, Artificial Sequence
  n-mer motif
SSSQTVL

SEQ ID NO: 2117 - protein, 7 aa, Artificial Sequence
  n-mer motif
VIQSDNT

SEQ ID NO: 2118 - protein, 7 aa, Artificial Sequence
  n-mer motif
VPAHSRG

SEQ ID NO: 2119 - protein, 7 aa, Artificial Sequence
  n-mer motif
SNTGSLG

SEQ ID NO: 2120 - protein, 7 aa, Artificial Sequence
  n-mer motif
WAKDVNV

SEQ ID NO: 2121 - protein, 7 aa, Artificial Sequence
  n-mer motif
NVLGASS

SEQ ID NO: 2122 - protein, 7 aa, Artificial Sequence
  n-mer motif
TPEASAR

SEQ ID NO: 2123 - protein, 7 aa, Artificial Sequence
  n-mer motif
NYNGVNV

SEQ ID NO: 2124 - protein, 7 aa, Artificial Sequence
  n-mer motif
NTTGSSG

SEQ ID NO: 2125 - protein, 7 aa, Artificial Sequence
  n-mer motif
SSGQPLV

SEQ ID NO: 2126 - protein, 7 aa, Artificial Sequence
  n-mer motif
QAGGVAS

SEQ ID NO: 2127 - protein, 7 aa, Artificial Sequence
  n-mer motif
PLQSQSG

SEQ ID NO: 2128 - protein, 7 aa, Artificial Sequence
  n-mer motif
QRTSEAP

SEQ ID NO: 2129 - protein, 7 aa, Artificial Sequence
  n-mer motif
LAKTVAI

SEQ ID NO: 2130 - protein, 7 aa, Artificial Sequence
  n-mer motif
THTLGGT

SEQ ID NO: 2131 - protein, 7 aa, Artificial Sequence
  n-mer motif
HDYSMNA

SEQ ID NO: 2132 - protein, 7 aa, Artificial Sequence
  n-mer motif
GKPAEAP

SEQ ID NO: 2133 - protein, 7 aa, Artificial Sequence
  n-mer motif
RNENVNA

SEQ ID NO: 2134 - protein, 7 aa, Artificial Sequence
  n-mer motif
SSREAKF

SEQ ID NO: 2135 - protein, 7 aa, Artificial Sequence
  n-mer motif
SSSDSPR

SEQ ID NO: 2136 - protein, 7 aa, Artificial Sequence
  n-mer motif
MNTTYNE

SEQ ID NO: 2137 - protein, 7 aa, Artificial Sequence
  n-mer motif
VRSGIKP

SEQ ID NO: 2138 - protein, 7 aa, Artificial Sequence
  n-mer motif
QENPMKM

SEQ ID NO: 2139 - protein, 7 aa, Artificial Sequence
  n-mer motif
TEPLPMS

SEQ ID NO: 2140 - protein, 7 aa, Artificial Sequence
  n-mer motif
RHGDTPM

SEQ ID NO: 2141 - protein, 7 aa, Artificial Sequence
  n-mer motif
AVNTYNS

SEQ ID NO: 2142 - protein, 7 aa, Artificial Sequence
  n-mer motif
ASTESHV

SEQ ID NO: 2143 - protein, 7 aa, Artificial Sequence
  n-mer motif
TNLSQSA

SEQ ID NO: 2144 - protein, 7 aa, Artificial Sequence
  n-mer motif
ELSTPMV

SEQ ID NO: 2145 - protein, 7 aa, Artificial Sequence
  n-mer motif
YAHPVTH

SEQ ID NO: 2146 - protein, 7 aa, Artificial Sequence
  n-mer motif
RGSTGTQ

SEQ ID NO: 2147 - protein, 7 aa, Artificial Sequence
  n-mer motif
CVGSCGV

SEQ ID NO: 2148 - protein, 7 aa, Artificial Sequence
  n-mer motif
SVAKDQT

SEQ ID NO: 2149 - protein, 7 aa, Artificial Sequence
  n-mer motif
TNLSPKT

SEQ ID NO: 2150 - protein, 7 aa, Artificial Sequence
  n-mer motif
LGFTPQP

SEQ ID NO: 2151 - protein, 7 aa, Artificial Sequence
  n-mer motif
NISSINQ

SEQ ID NO: 2152 - protein, 7 aa, Artificial Sequence
  n-mer motif
VYDNVSS

SEQ ID NO: 2153 - protein, 7 aa, Artificial Sequence
  n-mer motif
SGKQDKY

SEQ ID NO: 2154 - protein, 7 aa, Artificial Sequence
  n-mer motif
RLTELVI

SEQ ID NO: 2155 - protein, 7 aa, Artificial Sequence
  n-mer motif
HKSESHN

SEQ ID NO: 2156 - protein, 7 aa, Artificial Sequence
  n-mer motif
EATHGSY

SEQ ID NO: 2157 - protein, 7 aa, Artificial Sequence
  n-mer motif
NLLVDQR

SEQ ID NO: 2158 - protein, 7 aa, Artificial Sequence
  n-mer motif
NINDTKN

SEQ ID NO: 2159 - protein, 7 aa, Artificial Sequence
  n-mer motif
LAVTNVR

SEQ ID NO: 2160 - protein, 7 aa, Artificial Sequence
  n-mer motif
PSTLAET

SEQ ID NO: 2161 - protein, 7 aa, Artificial Sequence
  n-mer motif
PKPGTGE

SEQ ID NO: 2162 - protein, 7 aa, Artificial Sequence
  n-mer motif
VLLQNSH

SEQ ID NO: 2163 - protein, 7 aa, Artificial Sequence
  n-mer motif
YGNANTV

SEQ ID NO: 2164 - protein, 7 aa, Artificial Sequence
  n-mer motif
TSGVLTR

SEQ ID NO: 2165 - protein, 7 aa, Artificial Sequence
  n-mer motif
KITETNL

SEQ ID NO: 2166 - protein, 7 aa, Artificial Sequence
  n-mer motif
VRRDETP

SEQ ID NO: 2167 - protein, 7 aa, Artificial Sequence
  n-mer motif
SKMSNPV

SEQ ID NO: 2168 - protein, 7 aa, Artificial Sequence
  n-mer motif
WESLSNA

SEQ ID NO: 2169 - protein, 7 aa, Artificial Sequence
  n-mer motif
ANGGGYP

SEQ ID NO: 2170 - protein, 7 aa, Artificial Sequence
  n-mer motif
MLASRVP

SEQ ID NO: 2171 - protein, 7 aa, Artificial Sequence
  n-mer motif
CGLNCGK

SEQ ID NO: 2172 - protein, 7 aa, Artificial Sequence
  n-mer motif
TITSPSV

SEQ ID NO: 2173 - protein, 7 aa, Artificial Sequence
  n-mer motif
WSNAQSP

SEQ ID NO: 2174 - protein, 7 aa, Artificial Sequence
  n-mer motif
TESPKLL

SEQ ID NO: 2175 - protein, 7 aa, Artificial Sequence
  n-mer motif
HLVTSGI

SEQ ID NO: 2176 - protein, 7 aa, Artificial Sequence
  n-mer motif
PPKSDSN

SEQ ID NO: 2177 - protein, 7 aa, Artificial Sequence
  n-mer motif
IAVHVLS

SEQ ID NO: 2178 - protein, 7 aa, Artificial Sequence
  n-mer motif
TGTATLP

SEQ ID NO: 2179 - protein, 7 aa, Artificial Sequence
  n-mer motif
NTTPPNH

SEQ ID NO: 2180 - protein, 7 aa, Artificial Sequence
  n-mer motif
CTATKCS

SEQ ID NO: 2181 - protein, 7 aa, Artificial Sequence
  n-mer motif
HSDMVSG

SEQ ID NO: 2182 - protein, 7 aa, Artificial Sequence
  n-mer motif
PNAHHLP

SEQ ID NO: 2183 - protein, 7 aa, Artificial Sequence
  n-mer motif
SNNMNQA

SEQ ID NO: 2184 - protein, 7 aa, Artificial Sequence
  n-mer motif
SDNNRAN

SEQ ID NO: 2185 - protein, 7 aa, Artificial Sequence
  n-mer motif
LQTPGTT

SEQ ID NO: 2186 - protein, 7 aa, Artificial Sequence
  n-mer motif
VRGVQDA

SEQ ID NO: 2187 - protein, 7 aa, Artificial Sequence
  n-mer motif
SLDSRSS

SEQ ID NO: 2188 - protein, 7 aa, Artificial Sequence
  n-mer motif
VCVTTCA

SEQ ID NO: 2189 - protein, 7 aa, Artificial Sequence
  n-mer motif
PNTNHLV

SEQ ID NO: 2190 - protein, 7 aa, Artificial Sequence
  n-mer motif
LMSGKEN

SEQ ID NO: 2191 - protein, 7 aa, Artificial Sequence
  n-mer motif
TSASENW

SEQ ID NO: 2192 - protein, 7 aa, Artificial Sequence
  n-mer motif
FLPQLGQ

SEQ ID NO: 2193 - protein, 7 aa, Artificial Sequence
  n-mer motif
PFNPGNV

SEQ ID NO: 2194 - protein, 7 aa, Artificial Sequence
  n-mer motif
GTPGQSI

SEQ ID NO: 2195 - protein, 7 aa, Artificial Sequence
  n-mer motif
YNNGGHV

SEQ ID NO: 2196 - protein, 7 aa, Artificial Sequence
  n-mer motif
LGNHYTP

SEQ ID NO: 2197 - protein, 7 aa, Artificial Sequence
  n-mer motif
QVNQPRI

SEQ ID NO: 2198 - protein, 7 aa, Artificial Sequence
  n-mer motif
LGNNRPL

SEQ ID NO: 2199 - protein, 7 aa, Artificial Sequence
  n-mer motif
PPESARG

SEQ ID NO: 2200 - protein, 7 aa, Artificial Sequence
  n-mer motif
KSVGDGR

SEQ ID NO: 2201 - protein, 7 aa, Artificial Sequence
  n-mer motif
SLRTDEF

SEQ ID NO: 2202 - protein, 7 aa, Artificial Sequence
  n-mer motif
STTNVAY

SEQ ID NO: 2203 - protein, 7 aa, Artificial Sequence
  n-mer motif
RMSDPSD

SEQ ID NO: 2204 - protein, 7 aa, Artificial Sequence
  n-mer motif
SLSITSA

SEQ ID NO: 2205 - protein, 7 aa, Artificial Sequence
  n-mer motif
ESATSLK

SEQ ID NO: 2206 - protein, 7 aa, Artificial Sequence
  n-mer motif
YTDGRNT

SEQ ID NO: 2207 - protein, 7 aa, Artificial Sequence
  n-mer motif
SISNLRT

SEQ ID NO: 2208 - protein, 7 aa, Artificial Sequence
  n-mer motif
QNDKSDN

SEQ ID NO: 2209 - protein, 7 aa, Artificial Sequence
  n-mer motif
GGTGLSK

SEQ ID NO: 2210 - protein, 7 aa, Artificial Sequence
  n-mer motif
SQAQIRV

SEQ ID NO: 2211 - protein, 7 aa, Artificial Sequence
  n-mer motif
GLMAHVT

SEQ ID NO: 2212 - protein, 7 aa, Artificial Sequence
  n-mer motif
LVVSNSL

SEQ ID NO: 2213 - protein, 7 aa, Artificial Sequence
  n-mer motif
HDSVNTA

SEQ ID NO: 2214 - protein, 7 aa, Artificial Sequence
  n-mer motif
TLAKDGN

SEQ ID NO: 2215 - protein, 7 aa, Artificial Sequence
  n-mer motif
SDGSKLL

SEQ ID NO: 2216 - protein, 7 aa, Artificial Sequence
  n-mer motif
IDKTFSV

SEQ ID NO: 2217 - protein, 7 aa, Artificial Sequence
  n-mer motif
RLVNIDH

SEQ ID NO: 2218 - protein, 7 aa, Artificial Sequence
  n-mer motif
KNYDSDS

SEQ ID NO: 2219 - protein, 7 aa, Artificial Sequence
  n-mer motif
STQSTNP

SEQ ID NO: 2220 - protein, 7 aa, Artificial Sequence
  n-mer motif
QISLQLG

SEQ ID NO: 2221 - protein, 7 aa, Artificial Sequence
  n-mer motif
SEPLRVG

SEQ ID NO: 2222 - protein, 7 aa, Artificial Sequence
  n-mer motif
SRLQTQQ

SEQ ID NO: 2223 - protein, 7 aa, Artificial Sequence
  n-mer motif
EGSQGNH

SEQ ID NO: 2224 - protein, 7 aa, Artificial Sequence
  n-mer motif
RSDLTES

SEQ ID NO: 2225 - protein, 7 aa, Artificial Sequence
  n-mer motif
HTGVQTN

SEQ ID NO: 2226 - protein, 7 aa, Artificial Sequence
  n-mer motif
ELDHLSH

SEQ ID NO: 2227 - protein, 7 aa, Artificial Sequence
  n-mer motif
VTGVDYA

SEQ ID NO: 2228 - protein, 7 aa, Artificial Sequence
  n-mer motif
GGAHTRV

SEQ ID NO: 2229 - protein, 7 aa, Artificial Sequence
  n-mer motif
AYGIHEV

SEQ ID NO: 2230 - protein, 7 aa, Artificial Sequence
  n-mer motif
AMLRMEQ

SEQ ID NO: 2231 - protein, 7 aa, Artificial Sequence
  n-mer motif
RQANQTY

SEQ ID NO: 2232 - protein, 7 aa, Artificial Sequence
  n-mer motif
FSGQALA

SEQ ID NO: 2233 - protein, 7 aa, Artificial Sequence
  n-mer motif
DNVNSQP

SEQ ID NO: 2234 - protein, 7 aa, Artificial Sequence
  n-mer motif
GLHGTSN

SEQ ID NO: 2235 - protein, 7 aa, Artificial Sequence
  n-mer motif
EREPPKN

SEQ ID NO: 2236 - protein, 7 aa, Artificial Sequence
  n-mer motif
VVTLGML

SEQ ID NO: 2237 - protein, 7 aa, Artificial Sequence
  n-mer motif
HNNNLLN

SEQ ID NO: 2238 - protein, 7 aa, Artificial Sequence
  n-mer motif
LINMSQN

SEQ ID NO: 2239 - protein, 7 aa, Artificial Sequence
  n-mer motif
NTNASYS

SEQ ID NO: 2240 - protein, 7 aa, Artificial Sequence
  n-mer motif
RLNAGEH

SEQ ID NO: 2241 - protein, 7 aa, Artificial Sequence
  n-mer motif
AVILNPV

SEQ ID NO: 2242 - protein, 7 aa, Artificial Sequence
  n-mer motif
PSTHGYV

SEQ ID NO: 2243 - protein, 7 aa, Artificial Sequence
  n-mer motif
LRASVSE

SEQ ID NO: 2244 - protein, 7 aa, Artificial Sequence
  n-mer motif
MMTSMTL

SEQ ID NO: 2245 - protein, 7 aa, Artificial Sequence
  n-mer motif
SAHNIVY

SEQ ID NO: 2246 - protein, 7 aa, Artificial Sequence
  n-mer motif
HDSTTRP

SEQ ID NO: 2247 - protein, 7 aa, Artificial Sequence
  n-mer motif
IKDSYLT

SEQ ID NO: 2248 - protein, 7 aa, Artificial Sequence
  n-mer motif
YTPGLTE

SEQ ID NO: 2249 - protein, 7 aa, Artificial Sequence
  n-mer motif
KMGGSQS

SEQ ID NO: 2250 - protein, 7 aa, Artificial Sequence
  n-mer motif
SRQTALT

SEQ ID NO: 2251 - protein, 7 aa, Artificial Sequence
  n-mer motif
VETSRLY

SEQ ID NO: 2252 - protein, 7 aa, Artificial Sequence
  n-mer motif
KSNNGEY

SEQ ID NO: 2253 - protein, 7 aa, Artificial Sequence
  n-mer motif
SGVHSAR

SEQ ID NO: 2254 - protein, 7 aa, Artificial Sequence
  n-mer motif
PNNEKNP

SEQ ID NO: 2255 - protein, 7 aa, Artificial Sequence
  n-mer motif
TIGEGYH

SEQ ID NO: 2256 - protein, 7 aa, Artificial Sequence
  n-mer motif
LQTSVAT

SEQ ID NO: 2257 - protein, 7 aa, Artificial Sequence
  n-mer motif
LLGNAPT

SEQ ID NO: 2258 - protein, 7 aa, Artificial Sequence
  n-mer motif
ISGSHLN

SEQ ID NO: 2259 - protein, 7 aa, Artificial Sequence
  n-mer motif
KSLSSDD

SEQ ID NO: 2260 - protein, 7 aa, Artificial Sequence
  n-mer motif
TRTQGTS

SEQ ID NO: 2261 - protein, 7 aa, Artificial Sequence
  n-mer motif
VSRSGST

SEQ ID NO: 2262 - protein, 7 aa, Artificial Sequence
  n-mer motif
SADTRSP

SEQ ID NO: 2263 - protein, 7 aa, Artificial Sequence
  n-mer motif
RDTANGP

SEQ ID NO: 2264 - protein, 7 aa, Artificial Sequence
  n-mer motif
MMSNSLA

SEQ ID NO: 2265 - protein, 7 aa, Artificial Sequence
  n-mer motif
TGRIELR

SEQ ID NO: 2266 - protein, 7 aa, Artificial Sequence
  n-mer motif
ANNAAAS

SEQ ID NO: 2267 - protein, 7 aa, Artificial Sequence
  n-mer motif
QLNINDK

SEQ ID NO: 2268 - protein, 7 aa, Artificial Sequence
  n-mer motif
MDGAHTS

SEQ ID NO: 2269 - protein, 7 aa, Artificial Sequence
  n-mer motif
TSATDSM

SEQ ID NO: 2270 - protein, 7 aa, Artificial Sequence
  n-mer motif
AASLSQS

SEQ ID NO: 2271 - protein, 7 aa, Artificial Sequence
  n-mer motif
SQAGLLV

SEQ ID NO: 2272 - protein, 7 aa, Artificial Sequence
  n-mer motif
TTYSDLS

SEQ ID NO: 2273 - protein, 7 aa, Artificial Sequence
  n-mer motif
FSSGTTI

SEQ ID NO: 2274 - protein, 7 aa, Artificial Sequence
  n-mer motif
VFTEIES

SEQ ID NO: 2275 - protein, 7 aa, Artificial Sequence
  n-mer motif
ADPAKGK

SEQ ID NO: 2276 - protein, 7 aa, Artificial Sequence
  n-mer motif
KESEYRV

SEQ ID NO: 2277 - protein, 7 aa, Artificial Sequence
  n-mer motif
GMVSLNR

SEQ ID NO: 2278 - protein, 7 aa, Artificial Sequence
  n-mer motif
TVIERKD

SEQ ID NO: 2279 - protein, 7 aa, Artificial Sequence
  n-mer motif
RIDTLLV

SEQ ID NO: 2280 - protein, 7 aa, Artificial Sequence
  n-mer motif
GSTGLPP

SEQ ID NO: 2281 - protein, 7 aa, Artificial Sequence
  n-mer motif
MELTSTS

SEQ ID NO: 2282 - protein, 7 aa, Artificial Sequence
  n-mer motif
QPGAPQT

SEQ ID NO: 2283 - protein, 7 aa, Artificial Sequence
  n-mer motif
NSMGNGG

SEQ ID NO: 2284 - protein, 7 aa, Artificial Sequence
  n-mer motif
GSTKSGQ

SEQ ID NO: 2285 - protein, 7 aa, Artificial Sequence
  n-mer motif
TFLPQLG

SEQ ID NO: 2286 - protein, 7 aa, Artificial Sequence
  n-mer motif
MGINVLS

SEQ ID NO: 2287 - protein, 7 aa, Artificial Sequence
  n-mer motif
VNLGISG

SEQ ID NO: 2288 - protein, 7 aa, Artificial Sequence
  n-mer motif
SENRAGN

SEQ ID NO: 2289 - protein, 7 aa, Artificial Sequence
  n-mer motif
HSNATTI

SEQ ID NO: 2290 - protein, 7 aa, Artificial Sequence
  n-mer motif
PGSSASI

SEQ ID NO: 2291 - protein, 7 aa, Artificial Sequence
  n-mer motif
ITSLNGM

SEQ ID NO: 2292 - protein, 7 aa, Artificial Sequence
  n-mer motif
YLEGAHR

SEQ ID NO: 2293 - protein, 7 aa, Artificial Sequence
  n-mer motif
RQVEQSD

SEQ ID NO: 2294 - protein, 7 aa, Artificial Sequence
  n-mer motif
SSQSSGS

SEQ ID NO: 2295 - protein, 7 aa, Artificial Sequence
  n-mer motif
QLTVGKP

SEQ ID NO: 2296 - protein, 7 aa, Artificial Sequence
  n-mer motif
VVHSSIT

SEQ ID NO: 2297 - protein, 7 aa, Artificial Sequence
  n-mer motif
LEQLRVP

SEQ ID NO: 2298 - protein, 7 aa, Artificial Sequence
  n-mer motif
QHSPKPV

SEQ ID NO: 2299 - protein, 7 aa, Artificial Sequence
  n-mer motif
AGSSPSR

SEQ ID NO: 2300 - protein, 7 aa, Artificial Sequence
  n-mer motif
GVTIGSR

SEQ ID NO: 2301 - protein, 7 aa, Artificial Sequence
  n-mer motif
YIAGGDQ

SEQ ID NO: 2302 - protein, 7 aa, Artificial Sequence
  n-mer motif
ISSERFS

SEQ ID NO: 2303 - protein, 7 aa, Artificial Sequence
  n-mer motif
RSEGNHA

SEQ ID NO: 2304 - protein, 7 aa, Artificial Sequence
  n-mer motif
EKGNSGV

SEQ ID NO: 2305 - protein, 7 aa, Artificial Sequence
  n-mer motif
YIVDHAN

SEQ ID NO: 2306 - protein, 7 aa, Artificial Sequence
  n-mer motif
RRLSTDL

SEQ ID NO: 2307 - protein, 7 aa, Artificial Sequence
  n-mer motif
ANSRLGA

SEQ ID NO: 2308 - protein, 7 aa, Artificial Sequence
  n-mer motif
GTAENTS

SEQ ID NO: 2309 - protein, 7 aa, Artificial Sequence
  n-mer motif
VRDVAKE

SEQ ID NO: 2310 - protein, 7 aa, Artificial Sequence
  n-mer motif
GGLTNGL

SEQ ID NO: 2311 - protein, 7 aa, Artificial Sequence
  n-mer motif
PSIPSFS

SEQ ID NO: 2312 - protein, 7 aa, Artificial Sequence
  n-mer motif
NALLNAP

SEQ ID NO: 2313 - protein, 7 aa, Artificial Sequence
  n-mer motif
DDMVKNS

SEQ ID NO: 2314 - protein, 7 aa, Artificial Sequence
  n-mer motif
TANTHAL

SEQ ID NO: 2315 - protein, 7 aa, Artificial Sequence
  n-mer motif
VYATALA

SEQ ID NO: 2316 - protein, 7 aa, Artificial Sequence
  n-mer motif
GIYPAST

SEQ ID NO: 2317 - protein, 7 aa, Artificial Sequence
  n-mer motif
GFDGKQL

SEQ ID NO: 2318 - protein, 7 aa, Artificial Sequence
  n-mer motif
HSMSANT

SEQ ID NO: 2319 - protein, 7 aa, Artificial Sequence
  n-mer motif
WSIKNQT

SEQ ID NO: 2320 - protein, 7 aa, Artificial Sequence
  n-mer motif
TLHTKDL

SEQ ID NO: 2321 - protein, 7 aa, Artificial Sequence
  n-mer motif
SYGNTHD

SEQ ID NO: 2322 - protein, 7 aa, Artificial Sequence
  n-mer motif
QSGSLVP

SEQ ID NO: 2323 - protein, 7 aa, Artificial Sequence
  n-mer motif
NTLQNSH

SEQ ID NO: 2324 - protein, 7 aa, Artificial Sequence
  n-mer motif
TAESSHP

SEQ ID NO: 2325 - protein, 7 aa, Artificial Sequence
  n-mer motif
ASTVSLY

SEQ ID NO: 2326 - protein, 7 aa, Artificial Sequence
  n-mer motif
LTAVAIS

SEQ ID NO: 2327 - protein, 7 aa, Artificial Sequence
  n-mer motif
VSGQSAY

SEQ ID NO: 2328 - protein, 7 aa, Artificial Sequence
  n-mer motif
GETNFPT

SEQ ID NO: 2329 - protein, 7 aa, Artificial Sequence
  n-mer motif
NDNRSMN

SEQ ID NO: 2330 - protein, 7 aa, Artificial Sequence
  n-mer motif
RSGDPKN

SEQ ID NO: 2331 - protein, 7 aa, Artificial Sequence
  n-mer motif
WESDKFR

SEQ ID NO: 2332 - protein, 7 aa, Artificial Sequence
  n-mer motif
QVNHNTS

SEQ ID NO: 2333 - protein, 7 aa, Artificial Sequence
  n-mer motif
GWSNNEL

SEQ ID NO: 2334 - protein, 7 aa, Artificial Sequence
  n-mer motif
RAVLATN

SEQ ID NO: 2335 - protein, 7 aa, Artificial Sequence
  n-mer motif
HMGLNEL

SEQ ID NO: 2336 - protein, 7 aa, Artificial Sequence
  n-mer motif
GESSSIS

SEQ ID NO: 2337 - protein, 7 aa, Artificial Sequence
  n-mer motif
IHKSSVE

SEQ ID NO: 2338 - protein, 7 aa, Artificial Sequence
  n-mer motif
MSGSMIS

SEQ ID NO: 2339 - protein, 7 aa, Artificial Sequence
  n-mer motif
LSLAGNR

SEQ ID NO: 2340 - protein, 7 aa, Artificial Sequence
  n-mer motif
SATTNHG

SEQ ID NO: 2341 - protein, 7 aa, Artificial Sequence
  n-mer motif
STESNAS

SEQ ID NO: 2342 - protein, 7 aa, Artificial Sequence
  n-mer motif
PIAERPS

SEQ ID NO: 2343 - protein, 7 aa, Artificial Sequence
  n-mer motif
LLPNNTH

SEQ ID NO: 2344 - protein, 7 aa, Artificial Sequence
  n-mer motif
GTLKKDA

SEQ ID NO: 2345 - protein, 7 aa, Artificial Sequence
  n-mer motif
ALENRSL

SEQ ID NO: 2346 - protein, 7 aa, Artificial Sequence
  n-mer motif
TTGNSTM

SEQ ID NO: 2347 - protein, 7 aa, Artificial Sequence
  n-mer motif
VYDSAPN

SEQ ID NO: 2348 - protein, 7 aa, Artificial Sequence
  n-mer motif
LLSKGDS

SEQ ID NO: 2349 - protein, 7 aa, Artificial Sequence
  n-mer motif
SYAINQS

SEQ ID NO: 2350 - protein, 7 aa, Artificial Sequence
  n-mer motif
GGGERST

SEQ ID NO: 2351 - protein, 7 aa, Artificial Sequence
  n-mer motif
IQVSGSQ

SEQ ID NO: 2352 - protein, 7 aa, Artificial Sequence
  n-mer motif
YPVSLSP

SEQ ID NO: 2353 - protein, 7 aa, Artificial Sequence
  n-mer motif
ELGNKTA

SEQ ID NO: 2354 - protein, 7 aa, Artificial Sequence
  n-mer motif
SGVNFGV

SEQ ID NO: 2355 - protein, 7 aa, Artificial Sequence
  n-mer motif
AWSSPSG

SEQ ID NO: 2356 - protein, 7 aa, Artificial Sequence
  n-mer motif
GVNYHTT

SEQ ID NO: 2357 - protein, 7 aa, Artificial Sequence
  n-mer motif
LIGELKM

SEQ ID NO: 2358 - protein, 7 aa, Artificial Sequence
  n-mer motif
YLNSKQL

SEQ ID NO: 2359 - protein, 7 aa, Artificial Sequence
  n-mer motif
TVDRPIV

SEQ ID NO: 2360 - protein, 7 aa, Artificial Sequence
  n-mer motif
VSKTKDS

SEQ ID NO: 2361 - protein, 7 aa, Artificial Sequence
  n-mer motif
QAGNAPR

SEQ ID NO: 2362 - protein, 7 aa, Artificial Sequence
  n-mer motif
QDQTSNR

SEQ ID NO: 2363 - protein, 7 aa, Artificial Sequence
  n-mer motif
DTTYRNT

SEQ ID NO: 2364 - protein, 7 aa, Artificial Sequence
  n-mer motif
GTTEVNK

SEQ ID NO: 2365 - protein, 7 aa, Artificial Sequence
  n-mer motif
GFTNTSK

SEQ ID NO: 2366 - protein, 7 aa, Artificial Sequence
  n-mer motif
VQKNDVL

SEQ ID NO: 2367 - protein, 7 aa, Artificial Sequence
  n-mer motif
SVNNMRL

SEQ ID NO: 2368 - protein, 7 aa, Artificial Sequence
  n-mer motif
FSAALPL

SEQ ID NO: 2369 - protein, 7 aa, Artificial Sequence
  n-mer motif
DVPNNKR

SEQ ID NO: 2370 - protein, 7 aa, Artificial Sequence
  n-mer motif
GETMRHN

SEQ ID NO: 2371 - protein, 7 aa, Artificial Sequence
  n-mer motif
IRTSVIN

SEQ ID NO: 2372 - protein, 7 aa, Artificial Sequence
  n-mer motif
PRAPGHN

SEQ ID NO: 2373 - protein, 7 aa, Artificial Sequence
  n-mer motif
SVAHPLS

SEQ ID NO: 2374 - protein, 7 aa, Artificial Sequence
  n-mer motif
MTITVEP

SEQ ID NO: 2375 - protein, 7 aa, Artificial Sequence
  n-mer motif
PLNANGS

SEQ ID NO: 2376 - protein, 7 aa, Artificial Sequence
  n-mer motif
NRQRDFE

SEQ ID NO: 2377 - protein, 7 aa, Artificial Sequence
  n-mer motif
DIHNPRT

SEQ ID NO: 2378 - protein, 7 aa, Artificial Sequence
  n-mer motif
WIAGNHS

SEQ ID NO: 2379 - protein, 7 aa, Artificial Sequence
  n-mer motif
STHHADR

SEQ ID NO: 2380 - protein, 7 aa, Artificial Sequence
  n-mer motif
PESAAKS

SEQ ID NO: 2381 - protein, 7 aa, Artificial Sequence
  n-mer motif
HSDKVSS

SEQ ID NO: 2382 - protein, 7 aa, Artificial Sequence
  n-mer motif
SNSADAG

SEQ ID NO: 2383 - protein, 7 aa, Artificial Sequence
  n-mer motif
EFQRIRE

SEQ ID NO: 2384 - protein, 7 aa, Artificial Sequence
  n-mer motif
SAGMTLD

SEQ ID NO: 2385 - protein, 7 aa, Artificial Sequence
  n-mer motif
TQTSTWT

SEQ ID NO: 2386 - protein, 7 aa, Artificial Sequence
  n-mer motif
TTLTQTD

SEQ ID NO: 2387 - protein, 7 aa, Artificial Sequence
  n-mer motif
ASKGFGH

SEQ ID NO: 2388 - protein, 7 aa, Artificial Sequence
  n-mer motif
PATMISE

SEQ ID NO: 2389 - protein, 7 aa, Artificial Sequence
  n-mer motif
TDSSADS

SEQ ID NO: 2390 - protein, 7 aa, Artificial Sequence
  n-mer motif
STRKEHD

SEQ ID NO: 2391 - protein, 7 aa, Artificial Sequence
  n-mer motif
GDISYRV

SEQ ID NO: 2392 - protein, 7 aa, Artificial Sequence
  n-mer motif
MGYVDSL

SEQ ID NO: 2393 - protein, 7 aa, Artificial Sequence
  n-mer motif
QTITSQM

SEQ ID NO: 2394 - protein, 7 aa, Artificial Sequence
  n-mer motif
SIGYSPP

SEQ ID NO: 2395 - protein, 7 aa, Artificial Sequence
  n-mer motif
SSPDSYR

SEQ ID NO: 2396 - protein, 7 aa, Artificial Sequence
  n-mer motif
ISPSASN

SEQ ID NO: 2397 - protein, 7 aa, Artificial Sequence
  n-mer motif
YPADHRT

SEQ ID NO: 2398 - protein, 7 aa, Artificial Sequence
  n-mer motif
HTGQTPS

SEQ ID NO: 2399 - protein, 7 aa, Artificial Sequence
  n-mer motif
QTTILAA

SEQ ID NO: 2400 - protein, 7 aa, Artificial Sequence
  n-mer motif
DGTRQVH

SEQ ID NO: 2401 - protein, 7 aa, Artificial Sequence
  n-mer motif
RSSPATN

SEQ ID NO: 2402 - protein, 7 aa, Artificial Sequence
  n-mer motif
AMSHTYK

SEQ ID NO: 2403 - protein, 7 aa, Artificial Sequence
  n-mer motif
MAAPPEH

SEQ ID NO: 2404 - protein, 7 aa, Artificial Sequence
  n-mer motif
GPSTSEA

SEQ ID NO: 2405 - protein, 7 aa, Artificial Sequence
  n-mer motif
HNHDRSS

SEQ ID NO: 2406 - protein, 7 aa, Artificial Sequence
  n-mer motif
VVPSTQA

SEQ ID NO: 2407 - protein, 7 aa, Artificial Sequence
  n-mer motif
IPVTTRN

SEQ ID NO: 2408 - protein, 7 aa, Artificial Sequence
  n-mer motif
NQLVRGT

SEQ ID NO: 2409 - protein, 7 aa, Artificial Sequence
  n-mer motif
GFALTGT

SEQ ID NO: 2410 - protein, 7 aa, Artificial Sequence
  n-mer motif
SKGGDMV

SEQ ID NO: 2411 - protein, 7 aa, Artificial Sequence
  n-mer motif
ARPGQSM

SEQ ID NO: 2412 - protein, 7 aa, Artificial Sequence
  n-mer motif
KADYESS

SEQ ID NO: 2413 - protein, 7 aa, Artificial Sequence
  n-mer motif
GPSSHIV

SEQ ID NO: 2414 - protein, 7 aa, Artificial Sequence
  n-mer motif
EVVKTTH

SEQ ID NO: 2415 - protein, 7 aa, Artificial Sequence
  n-mer motif
TLDNNHS

SEQ ID NO: 2416 - protein, 7 aa, Artificial Sequence
  n-mer motif
TIYNMGP

SEQ ID NO: 2417 - protein, 7 aa, Artificial Sequence
  n-mer motif
STMNTIT

SEQ ID NO: 2418 - protein, 7 aa, Artificial Sequence
  n-mer motif
TLARTTE

SEQ ID NO: 2419 - protein, 7 aa, Artificial Sequence
  n-mer motif
LISSQTS

SEQ ID NO: 2420 - protein, 7 aa, Artificial Sequence
  n-mer motif
QTASGDT

SEQ ID NO: 2421 - protein, 7 aa, Artificial Sequence
  n-mer motif
AHGAFPV

SEQ ID NO: 2422 - protein, 7 aa, Artificial Sequence
  n-mer motif
GETRSTA

SEQ ID NO: 2423 - protein, 7 aa, Artificial Sequence
  n-mer motif
NNYAYSA

SEQ ID NO: 2424 - protein, 7 aa, Artificial Sequence
  n-mer motif
EAYQTEK

SEQ ID NO: 2425 - protein, 7 aa, Artificial Sequence
  n-mer motif
SLAHAVS

SEQ ID NO: 2426 - protein, 7 aa, Artificial Sequence
  n-mer motif
TYQLSGN

SEQ ID NO: 2427 - protein, 7 aa, Artificial Sequence
  n-mer motif
MSERLRI

SEQ ID NO: 2428 - protein, 7 aa, Artificial Sequence
  n-mer motif
GSGKDPG

SEQ ID NO: 2429 - protein, 7 aa, Artificial Sequence
  n-mer motif
YNSNASV

SEQ ID NO: 2430 - protein, 7 aa, Artificial Sequence
  n-mer motif
TRGDMEF

SEQ ID NO: 2431 - protein, 7 aa, Artificial Sequence
  n-mer motif
GITGSPG

SEQ ID NO: 2432 - protein, 7 aa, Artificial Sequence
  n-mer motif
QHTAHPM

SEQ ID NO: 2433 - protein, 7 aa, Artificial Sequence
  n-mer motif
DTANRST

SEQ ID NO: 2434 - protein, 7 aa, Artificial Sequence
  n-mer motif
SAHDARL

SEQ ID NO: 2435 - protein, 7 aa, Artificial Sequence
  n-mer motif
LNHTLGH

SEQ ID NO: 2436 - protein, 7 aa, Artificial Sequence
  n-mer motif
GFETSSP

SEQ ID NO: 2437 - protein, 7 aa, Artificial Sequence
  n-mer motif
GTSAESR

SEQ ID NO: 2438 - protein, 7 aa, Artificial Sequence
  n-mer motif
HANYVEV

SEQ ID NO: 2439 - protein, 7 aa, Artificial Sequence
  n-mer motif
TTKPVAE

SEQ ID NO: 2440 - protein, 7 aa, Artificial Sequence
  n-mer motif
STAVTNS

SEQ ID NO: 2441 - protein, 7 aa, Artificial Sequence
  n-mer motif
LGLAGQV

SEQ ID NO: 2442 - protein, 7 aa, Artificial Sequence
  n-mer motif
VLKGTFP

SEQ ID NO: 2443 - protein, 7 aa, Artificial Sequence
  n-mer motif
MNEPGRT

SEQ ID NO: 2444 - protein, 7 aa, Artificial Sequence
  n-mer motif
TSDPLRN

SEQ ID NO: 2445 - protein, 7 aa, Artificial Sequence
  n-mer motif
RDTNTDK

SEQ ID NO: 2446 - protein, 7 aa, Artificial Sequence
  n-mer motif
ESDLRQR

SEQ ID NO: 2447 - protein, 7 aa, Artificial Sequence
  n-mer motif
SGMAGLS

SEQ ID NO: 2448 - protein, 7 aa, Artificial Sequence
  n-mer motif
IATTSGR

SEQ ID NO: 2449 - protein, 7 aa, Artificial Sequence
  n-mer motif
TIRSEGF

SEQ ID NO: 2450 - protein, 7 aa, Artificial Sequence
  n-mer motif
GLSITIA

SEQ ID NO: 2451 - protein, 7 aa, Artificial Sequence
  n-mer motif
PPTNGRM

SEQ ID NO: 2452 - protein, 7 aa, Artificial Sequence
  n-mer motif
LQDRATN

SEQ ID NO: 2453 - protein, 7 aa, Artificial Sequence
  n-mer motif
LKSTGDH

SEQ ID NO: 2454 - protein, 7 aa, Artificial Sequence
  n-mer motif
DNNNQVY

SEQ ID NO: 2455 - protein, 7 aa, Artificial Sequence
  n-mer motif
VHMESYA

SEQ ID NO: 2456 - protein, 7 aa, Artificial Sequence
  n-mer motif
DQIGHGT

SEQ ID NO: 2457 - protein, 7 aa, Artificial Sequence
  n-mer motif
GTGPHGT

SEQ ID NO: 2458 - protein, 7 aa, Artificial Sequence
  n-mer motif
IGNNTGL

SEQ ID NO: 2459 - protein, 7 aa, Artificial Sequence
  n-mer motif
LNAEYTN

SEQ ID NO: 2460 - protein, 7 aa, Artificial Sequence
  n-mer motif
VTSSASG

SEQ ID NO: 2461 - protein, 7 aa, Artificial Sequence
  n-mer motif
THVAKPD

SEQ ID NO: 2462 - protein, 7 aa, Artificial Sequence
  n-mer motif
PMNKDIL

SEQ ID NO: 2463 - protein, 7 aa, Artificial Sequence
  n-mer motif
LSLNMNE

SEQ ID NO: 2464 - protein, 7 aa, Artificial Sequence
  n-mer motif
VGNSSTH

SEQ ID NO: 2465 - protein, 7 aa, Artificial Sequence
  n-mer motif
GHGSDLT

SEQ ID NO: 2466 - protein, 7 aa, Artificial Sequence
  n-mer motif
LTQNPTN

SEQ ID NO: 2467 - protein, 7 aa, Artificial Sequence
  n-mer motif
PSDHMRT

SEQ ID NO: 2468 - protein, 7 aa, Artificial Sequence
  n-mer motif
PDSRLAA

SEQ ID NO: 2469 - protein, 7 aa, Artificial Sequence
  n-mer motif
WGSEGTI

SEQ ID NO: 2470 - protein, 7 aa, Artificial Sequence
  n-mer motif
KPTNDSY

SEQ ID NO: 2471 - protein, 7 aa, Artificial Sequence
  n-mer motif
NRGTEVY

SEQ ID NO: 2472 - protein, 7 aa, Artificial Sequence
  n-mer motif
HVITTKD

SEQ ID NO: 2473 - protein, 7 aa, Artificial Sequence
  n-mer motif
IVSNPPA

SEQ ID NO: 2474 - protein, 7 aa, Artificial Sequence
  n-mer motif
MRNDQQL

SEQ ID NO: 2475 - protein, 7 aa, Artificial Sequence
  n-mer motif
FQRDVGH

SEQ ID NO: 2476 - protein, 7 aa, Artificial Sequence
  n-mer motif
ANDNTKQ

SEQ ID NO: 2477 - protein, 7 aa, Artificial Sequence
  n-mer motif
SVPHAGD

SEQ ID NO: 2478 - protein, 7 aa, Artificial Sequence
  n-mer motif
NATPPNH

SEQ ID NO: 2479 - protein, 7 aa, Artificial Sequence
  n-mer motif
SEHTSVL

SEQ ID NO: 2480 - protein, 7 aa, Artificial Sequence
  n-mer motif
AMSQTDI

SEQ ID NO: 2481 - protein, 7 aa, Artificial Sequence
  n-mer motif
PKAPLNN

SEQ ID NO: 2482 - protein, 7 aa, Artificial Sequence
  n-mer motif
TNNLLAQ

SEQ ID NO: 2483 - protein, 7 aa, Artificial Sequence
  n-mer motif
QRQGSGV

SEQ ID NO: 2484 - protein, 7 aa, Artificial Sequence
  n-mer motif
RSDTTNA

SEQ ID NO: 2485 - protein, 7 aa, Artificial Sequence
  n-mer motif
EADKNGV

SEQ ID NO: 2486 - protein, 7 aa, Artificial Sequence
  n-mer motif
MLGGFAQ

SEQ ID NO: 2487 - protein, 7 aa, Artificial Sequence
  n-mer motif
MTHLSTD

SEQ ID NO: 2488 - protein, 7 aa, Artificial Sequence
  n-mer motif
VLSDKAF

SEQ ID NO: 2489 - protein, 7 aa, Artificial Sequence
  n-mer motif
TPSGTIK

SEQ ID NO: 2490 - protein, 7 aa, Artificial Sequence
  n-mer motif
IILMGQS

SEQ ID NO: 2491 - protein, 7 aa, Artificial Sequence
  n-mer motif
LSGGETL

SEQ ID NO: 2492 - protein, 7 aa, Artificial Sequence
  n-mer motif
TDGALGY

SEQ ID NO: 2493 - protein, 7 aa, Artificial Sequence
  n-mer motif
GNKAALT

SEQ ID NO: 2494 - DNA, 21 bp, Artificial Sequence
  n-mer motif encoding polynucleotide
agaggagacttgacaacccca

SEQ ID NO: 2495 - DNA, 21 bp, Artificial Sequence
  n-mer motif encoding polynucleotide
cggggtgatcttaatcagtat

SEQ ID NO: 2496 - DNA, 21 bp, Artificial Sequence
  n-mer motif encoding polynucleotide
aggggtgatctttctacgcct

SEQ ID NO: 2497 - DNA, 21 bp, Artificial Sequence
  n-mer motif encoding polynucleotide
cggggtgatcagctttatcat

SEQ ID NO: 2498 - DNA, 21 bp, Artificial Sequence
  n-mer motif encoding polynucleotide
cgaggagacaccatgagcaaa

SEQ ID NO: 2499 - DNA, 21 bp, Artificial Sequence
  n-mer motif encoding polynucleotide
aggggggatgcgacggagctt

SEQ ID NO: 2500 - DNA, 21 bp, Artificial Sequence
  n-mer motif encoding polynucleotide
agaggcgacttatccacaccc

SEQ ID NO: 2501 - DNA, 21 bp, Artificial Sequence
  n-mer motif encoding polynucleotide
cgcggcgacatgataaacacc

SEQ ID NO: 2502 - DNA, 21 bp, Artificial Sequence
  n-mer motif encoding polynucleotide
aggggcgacctgaaccaatac

SEQ ID NO: 2503 - DNA, 21 bp, Artificial Sequence
  n-mer motif encoding polynucleotide
cggggggatactatgtctaag

SEQ ID NO: 2504 - DNA, 21 bp, Artificial Sequence
  n-mer motif encoding polynucleotide
cggggtgatcttactacgcct

SEQ ID NO: 2505 - DNA, 21 bp, Artificial Sequence
  n-mer motif encoding polynucleotide
aggggcgacctcaacgacagc

SEQ ID NO: 2506 - DNA, 21 bp, Artificial Sequence
  n-mer motif encoding polynucleotide
gcaaaccccaacatactagac

SEQ ID NO: 2507 - DNA, 21 bp, Artificial Sequence
  n-mer motif encoding polynucleotide
cgaggcgacacaatgaactac

SEQ ID NO: 2508 - DNA, 21 bp, Artificial Sequence
  n-mer motif encoding polynucleotide
atgagtaatttggggtatgag

SEQ ID NO: 2509 - DNA, 21 bp, Artificial Sequence
  n-mer motif encoding polynucleotide
tacacctctcaaaccagcact

SEQ ID NO: 2510 - DNA, 21 bp, Artificial Sequence
  n-mer motif encoding polynucleotide
ctcggaggaaacagcaggttc

SEQ ID NO: 2511 - DNA, 21 bp, Artificial Sequence
  n-mer motif encoding polynucleotide
caaagccaagcgatacaacta

SEQ ID NO: 2512 - DNA, 21 bp, Artificial Sequence
  n-mer motif encoding polynucleotide
aacacgtacacaccgggaaaa

SEQ ID NO: 2513 - DNA, 21 bp, Artificial Sequence
  n-mer motif encoding polynucleotide
ggggcggaagcgggccgccaa

SEQ ID NO: 2514 - DNA, 21 bp, Artificial Sequence
  n-mer motif encoding polynucleotide
gaacacgctacagcaaaacaa

SEQ ID NO: 2515 - DNA, 21 bp, Artificial Sequence
  n-mer motif encoding polynucleotide
gcggcacaactcgtcagtcca

SEQ ID NO: 2516 - DNA, 21 bp, Artificial Sequence
  n-mer motif encoding polynucleotide
gatcagacggctagtattgtt

SEQ ID NO: 2517 - DNA, 21 bp, Artificial Sequence
  n-mer motif encoding polynucleotide
gttcaaacccacataggagtc

SEQ ID NO: 2518 - DNA, 21 bp, Artificial Sequence
  n-mer motif encoding polynucleotide
tcttatggtaatactcatgat

SEQ ID NO: 2519 - DNA, 21 bp, Artificial Sequence
  n-mer motif encoding polynucleotide
acctccacggcttcaaaacaa

SEQ ID NO: 2520 - DNA, 21 bp, Artificial Sequence
  n-mer motif encoding polynucleotide
ttggtgactcatgagcggatt

SEQ ID NO: 2521 - DNA, 21 bp, Artificial Sequence
  n-mer motif encoding polynucleotide
atggataagtctaataattct

SEQ ID NO: 2522 - DNA, 21 bp, Artificial Sequence
  n-mer motif encoding polynucleotide
cgtggtgatatgtctcgtgag

SEQ ID NO: 2523 - DNA, 21 bp, Artificial Sequence
  n-mer motif encoding polynucleotide
cgcggtgacgtggcagaaata

SEQ ID NO: 2524 - DNA, 21 bp, Artificial Sequence
  n-mer motif encoding polynucleotide
ggtggcgaaaacagaacccca

SEQ ID NO: 2525 - DNA, 21 bp, Artificial Sequence
  n-mer motif encoding polynucleotide
gctgggcatcagcagcttgct

SEQ ID NO: 2526 - DNA, 21 bp, Artificial Sequence
  n-mer motif encoding polynucleotide
cgtcttaatagtagtatgaat

SEQ ID NO: 2527 - DNA, 21 bp, Artificial Sequence
  n-mer motif encoding polynucleotide
tattatgagaagcttagtgcg

SEQ ID NO: 2528 - DNA, 21 bp, Artificial Sequence
  n-mer motif encoding polynucleotide
gaagcgtccaactacgaacga

SEQ ID NO: 2529 - DNA, 21 bp, Artificial Sequence
  n-mer motif encoding polynucleotide
ttccaaactgacacgcaccga

SEQ ID NO: 2530 - DNA, 21 bp, Artificial Sequence
  n-mer motif encoding polynucleotide
aacagttcccaatggcccaac

SEQ ID NO: 2531 - DNA, 21 bp, Artificial Sequence
  n-mer motif encoding polynucleotide
gatggtaagactacgtctaat

SEQ ID NO: 2532 - DNA, 21 bp, Artificial Sequence
  n-mer motif encoding polynucleotide
gctgtgcatgcgactagtagt

SEQ ID NO: 2533 - DNA, 21 bp, Artificial Sequence
  n-mer motif encoding polynucleotide
aaaacactccccggcagggaa

SEQ ID NO: 2534 - DNA, 21 bp, Artificial Sequence
  n-mer motif encoding polynucleotide
atactgaaatccgacgcacca

SEQ ID NO: 2535 - DNA, 21 bp, Artificial Sequence
  n-mer motif encoding polynucleotide
agtacgaatgaggctcctaag

SEQ ID NO: 2536 - DNA, 21 bp, Artificial Sequence
  n-mer motif encoding polynucleotide
tttgatagtgcgaatggtcgg

SEQ ID NO: 2537 - DNA, 21 bp, Artificial Sequence
  n-mer motif encoding polynucleotide
atggacgctgcgtacggtagt

SEQ ID NO: 2538 - DNA, 21 bp, Artificial Sequence
  n-mer motif encoding polynucleotide
aacaaagaccacaaccacctg

SEQ ID NO: 2539 - DNA, 21 bp, Artificial Sequence
  n-mer motif encoding polynucleotide
ggtcagtatagtcagacgctt

SEQ ID NO: 2540 - DNA, 21 bp, Artificial Sequence
  n-mer motif encoding polynucleotide
gaagcattcccgcgagcgggc

SEQ ID NO: 2541 - DNA, 21 bp, Artificial Sequence
  n-mer motif encoding polynucleotide
gaacacactcacttaaacccg

SEQ ID NO: 2542 - DNA, 21 bp, Artificial Sequence
  n-mer motif encoding polynucleotide
atgcaacgcgaagacgcgaac

SEQ ID NO: 2543 - DNA, 21 bp, Artificial Sequence
  n-mer motif encoding polynucleotide
ctaaccggctctgacatgaaa

SEQ ID NO: 2544 - DNA, 21 bp, Artificial Sequence
  n-mer motif encoding polynucleotide
cgagtaaacaacgacgcaata

SEQ ID NO: 2545 - DNA, 21 bp, Artificial Sequence
  n-mer motif encoding polynucleotide
cgtggtgaccaaggcacacac

SEQ ID NO: 2546 - DNA, 21 bp, Artificial Sequence
  n-mer motif encoding polynucleotide
attaatattagtagtgatttt

SEQ ID NO: 2547 - DNA, 21 bp, Artificial Sequence
  n-mer motif encoding polynucleotide
aataatgataatggttttgtt

SEQ ID NO: 2548 - DNA, 21 bp, Artificial Sequence
  n-mer motif encoding polynucleotide
ttcatcgctaacactaaccca

SEQ ID NO: 2549 - DNA, 21 bp, Artificial Sequence
  n-mer motif encoding polynucleotide
ggactgcacggcaccaacgca

SEQ ID NO: 2550 - DNA, 21 bp, Artificial Sequence
  n-mer motif encoding polynucleotide
aaaaccatcgacatagcacaa

SEQ ID NO: 2551 - DNA, 21 bp, Artificial Sequence
  n-mer motif encoding polynucleotide
tcgagtgattctcgtattccg

SEQ ID NO: 2552 - DNA, 21 bp, Artificial Sequence
  n-mer motif encoding polynucleotide
tctacatctccggttaacagc

SEQ ID NO: 2553 - DNA, 21 bp, Artificial Sequence
  n-mer motif encoding polynucleotide
gccagcatgccctctgtagac

SEQ ID NO: 2554 - DNA, 21 bp, Artificial Sequence
  n-mer motif encoding polynucleotide
ggtcataatatggcacaggcg

SEQ ID NO: 2555 - DNA, 21 bp, Artificial Sequence
  n-mer motif encoding polynucleotide
cacaacaaaccaaacggagac

SEQ ID NO: 2556 - DNA, 21 bp, Artificial Sequence
  n-mer motif encoding polynucleotide
tacaggatggaaacgaaccca

SEQ ID NO: 2557 - DNA, 21 bp, Artificial Sequence
  n-mer motif encoding polynucleotide
cttgggaatgtggttcatccg

SEQ ID NO: 2558 - DNA, 21 bp, Artificial Sequence
  n-mer motif encoding polynucleotide
gtaacggcacaccaattatcc

SEQ ID NO: 2559 - DNA, 21 bp, Artificial Sequence
  n-mer motif encoding polynucleotide
actatggtagaagtactgcca

SEQ ID NO: 2560 - DNA, 21 bp, Artificial Sequence
  n-mer motif encoding polynucleotide
atcaaagggtctgggtcgcaa

SEQ ID NO: 2561 - DNA, 21 bp, Artificial Sequence
  n-mer motif encoding polynucleotide
actaatggggggtcgcttaat

SEQ ID NO: 2562 - DNA, 21 bp, Artificial Sequence
  n-mer motif encoding polynucleotide
ctcggaggaaacagcaggatc

SEQ ID NO: 2563 - DNA, 21 bp, Artificial Sequence
  n-mer motif encoding polynucleotide
aggggtgatgcggcgaataag

SEQ ID NO: 2564 - DNA, 21 bp, Artificial Sequence
  n-mer motif encoding polynucleotide
gcgttaaacgcccaagggatc

SEQ ID NO: 2565 - DNA, 21 bp, Artificial Sequence
  n-mer motif encoding polynucleotide
gctgagcatgcgactagtagt

SEQ ID NO: 2566 - DNA, 21 bp, Artificial Sequence
  n-mer motif encoding polynucleotide
tacttgaccaccggtactgcc

SEQ ID NO: 2567 - DNA, 21 bp, Artificial Sequence
  n-mer motif encoding polynucleotide
gcggaggctcagacgcgtgtg

SEQ ID NO: 2568 - DNA, 21 bp, Artificial Sequence
  n-mer motif encoding polynucleotide
gctgagcaggggctgtcttcg

SEQ ID NO: 2569 - DNA, 21 bp, Artificial Sequence
  n-mer motif encoding polynucleotide
ctgattgttactcagcatgtg

SEQ ID NO: 2570 - DNA, 21 bp, Artificial Sequence
  n-mer motif encoding polynucleotide
tctagttatcagtctgggctg

SEQ ID NO: 2571 - DNA, 21 bp, Artificial Sequence
  n-mer motif encoding polynucleotide
gctacggtttataatgagttg

SEQ ID NO: 2572 - DNA, 21 bp, Artificial Sequence
  n-mer motif encoding polynucleotide
catgatacggttggggagagg

SEQ ID NO: 2573 - DNA, 21 bp, Artificial Sequence
  n-mer motif encoding polynucleotide
cgtggggatttgaatgattct

SEQ ID NO: 2574 - DNA, 21 bp, Artificial Sequence
  n-mer motif encoding polynucleotide
catgatattagtctggatcgt

SEQ ID NO: 2575 - DNA, 21 bp, Artificial Sequence
  n-mer motif encoding polynucleotide
acagaacaatcttactcacga

SEQ ID NO: 2576 - DNA, 21 bp, Artificial Sequence
  n-mer motif encoding polynucleotide
tggtgaggggctgagtttgcc

SEQ ID NO: 2577 - DNA, 21 bp, Artificial Sequence
  n-mer motif encoding polynucleotide
gctgtgcatgcgactagtaga

SEQ ID NO: 2578 - DNA, 21 bp, Artificial Sequence
  n-mer motif encoding polynucleotide
attgagagtaagactgtgcag

SEQ ID NO: 2579 - DNA, 21 bp, Artificial Sequence
  n-mer motif encoding polynucleotide
acgaatgttagtacgcttttg

SEQ ID NO: 2580 - DNA, 21 bp, Artificial Sequence
  n-mer motif encoding polynucleotide
ccacccaacggcagcagtaga

SEQ ID NO: 2581 - DNA, 21 bp, Artificial Sequence
  n-mer motif encoding polynucleotide
ccctctacacacggctacgta

SEQ ID NO: 2582 - DNA, 21 bp, Artificial Sequence
  n-mer motif encoding polynucleotide
actgcggctagtactgcgagg

SEQ ID NO: 2583 - DNA, 21 bp, Artificial Sequence
  n-mer motif encoding polynucleotide
tacaacgcaggcggagaacaa

SEQ ID NO: 2584 - DNA, 21 bp, Artificial Sequence
  n-mer motif encoding polynucleotide
acccacaaccaacgtgaactg

SEQ ID NO: 2585 - DNA, 21 bp, Artificial Sequence
  n-mer motif encoding polynucleotide
accttcacggtcgacggtaga

SEQ ID NO: 2586 - DNA, 21 bp, Artificial Sequence
  n-mer motif encoding polynucleotide
cactccagccccgggtcgtca

SEQ ID NO: 2587 - DNA, 21 bp, Artificial Sequence
  n-mer motif encoding polynucleotide
agtacgagtggttataatact

SEQ ID NO: 2588 - DNA, 21 bp, Artificial Sequence
  n-mer motif encoding polynucleotide
tctgagaagctgactgataag

SEQ ID NO: 2589 - DNA, 21 bp, Artificial Sequence
  n-mer motif encoding polynucleotide
gggaggaacacaagtaacttg

SEQ ID NO: 2590 - DNA, 21 bp, Artificial Sequence
  n-mer motif encoding polynucleotide
accggaacagcgatctcccga

SEQ ID NO: 2591 - DNA, 21 bp, Artificial Sequence
  n-mer motif encoding polynucleotide
tctatgcaggatccttctttg

SEQ ID NO: 2592 - DNA, 21 bp, Artificial Sequence
  n-mer motif encoding polynucleotide
actcggagtgatattggtgtg

SEQ ID NO: 2593 - DNA, 21 bp, Artificial Sequence
  n-mer motif encoding polynucleotide
acgcagaatcatcagttgtct

SEQ ID NO: 2594 - DNA, 21 bp, Artificial Sequence
  n-mer motif encoding polynucleotide
tttgttgataataggcagcct

SEQ ID NO: 2595 - DNA, 21 bp, Artificial Sequence
  n-mer motif encoding polynucleotide
agtttgaattcttcgagtact

SEQ ID NO: 2596 - DNA, 21 bp, Artificial Sequence
  n-mer motif encoding polynucleotide
aaggcggtttcggagattatt

SEQ ID NO: 2597 - DNA, 21 bp, Artificial Sequence
  n-mer motif encoding polynucleotide
ggtacgagtgataattatagg

SEQ ID NO: 2598 - DNA, 21 bp, Artificial Sequence
  n-mer motif encoding polynucleotide
atgtctagccacaccgtccaa

SEQ ID NO: 2599 - DNA, 21 bp, Artificial Sequence
  n-mer motif encoding polynucleotide
agtatcacccacagcaacacc

SEQ ID NO: 2600 - DNA, 21 bp, Artificial Sequence
  n-mer motif encoding polynucleotide
gttcagactagtactggtgct

SEQ ID NO: 2601 - DNA, 21 bp, Artificial Sequence
  n-mer motif encoding polynucleotide
cgtggtgatatgactcgtgcg

SEQ ID NO: 2602 - DNA, 21 bp, Artificial Sequence
  n-mer motif encoding polynucleotide
attggtctgcagaattctact

SEQ ID NO: 2603 - DNA, 21 bp, Artificial Sequence
  n-mer motif encoding polynucleotide
agtgcggatcgtgataataag

SEQ ID NO: 2604 - DNA, 21 bp, Artificial Sequence
  n-mer motif encoding polynucleotide
tactctcaatccataaaaaac

SEQ ID NO: 2605 - DNA, 21 bp, Artificial Sequence
  n-mer motif encoding polynucleotide
cgctcgttggacagcgggatg

SEQ ID NO: 2606 - DNA, 21 bp, Artificial Sequence
  n-mer motif encoding polynucleotide
gctgtgcctcagtctctgcct

SEQ ID NO: 2607 - DNA, 21 bp, Artificial Sequence
  n-mer motif encoding polynucleotide
gcgaatgatagtattaagctg

SEQ ID NO: 2608 - DNA, 21 bp, Artificial Sequence
  n-mer motif encoding polynucleotide
aatggtaatatttatccgtct

SEQ ID NO: 2609 - DNA, 21 bp, Artificial Sequence
  n-mer motif encoding polynucleotide
gggcaaacaaacgcagtacac

SEQ ID NO: 2610 - DNA, 21 bp, Artificial Sequence
  n-mer motif encoding polynucleotide
caaggagacctacgtggctcg

SEQ ID NO: 2611 - DNA, 21 bp, Artificial Sequence
  n-mer motif encoding polynucleotide
gttaaggcgagtgctggggtt

SEQ ID NO: 2612 - DNA, 21 bp, Artificial Sequence
  n-mer motif encoding polynucleotide
atcgcgtcaacgtggaacatg

SEQ ID NO: 2613 - DNA, 21 bp, Artificial Sequence
  n-mer motif encoding polynucleotide
aactcggctgaatcctcgaga

SEQ ID NO: 2614 - DNA, 21 bp, Artificial Sequence
  n-mer motif encoding polynucleotide
gtcttcacgggccaaactgaa

SEQ ID NO: 2615 - DNA, 21 bp, Artificial Sequence
  n-mer motif encoding polynucleotide
tttggtacttcttatacgact

SEQ ID NO: 2616 - DNA, 21 bp, Artificial Sequence
  n-mer motif encoding polynucleotide
gcggttaatgagactaggctt

SEQ ID NO: 2617 - DNA, 21 bp, Artificial Sequence
  n-mer motif encoding polynucleotide
ggtcggacggatactcctaat

SEQ ID NO: 2618 - DNA, 21 bp, Artificial Sequence
  n-mer motif encoding polynucleotide
aacgaccgaccgcttgccagc

SEQ ID NO: 2619 - DNA, 21 bp, Artificial Sequence
  n-mer motif encoding polynucleotide
gcttatcagctgactccggct

SEQ ID NO: 2620 - DNA, 21 bp, Artificial Sequence
  n-mer motif encoding polynucleotide
atgggtgagatgggtaatatt

SEQ ID NO: 2621 - DNA, 21 bp, Artificial Sequence
  n-mer motif encoding polynucleotide
gcggacatgcaacacaccgta

SEQ ID NO: 2622 - DNA, 21 bp, Artificial Sequence
  n-mer motif encoding polynucleotide
gcggttgttctgaatagtaat

SEQ ID NO: 2623 - DNA, 21 bp, Artificial Sequence
  n-mer motif encoding polynucleotide
tttcgtgatggtcagggtatg

SEQ ID NO: 2624 - DNA, 21 bp, Artificial Sequence
  n-mer motif encoding polynucleotide
aaatcgacatcaaacatcgaa

SEQ ID NO: 2625 - DNA, 21 bp, Artificial Sequence
  n-mer motif encoding polynucleotide
acccaagccttctccctaggc

SEQ ID NO: 2626 - DNA, 21 bp, Artificial Sequence
  n-mer motif encoding polynucleotide
tggtcgagaactggaaacacc

SEQ ID NO: 2627 - DNA, 21 bp, Artificial Sequence
  n-mer motif encoding polynucleotide
agcacaaacaccgaacctagg

SEQ ID NO: 2628 - DNA, 21 bp, Artificial Sequence
  n-mer motif encoding polynucleotide
gagaatagtgatttgtcttat

SEQ ID NO: 2629 - DNA, 21 bp, Artificial Sequence
  n-mer motif encoding polynucleotide
atagacgaacgttcctcgata

SEQ ID NO: 2630 - DNA, 21 bp, Artificial Sequence
  n-mer motif encoding polynucleotide
gatgtgcattcgagtattcct

SEQ ID NO: 2631 - DNA, 21 bp, Artificial Sequence
  n-mer motif encoding polynucleotide
ataagcggttccactacacac

SEQ ID NO: 2632 - DNA, 21 bp, Artificial Sequence
  n-mer motif encoding polynucleotide
tggcaaacccaagtcactaca

SEQ ID NO: 2633 - DNA, 21 bp, Artificial Sequence
  n-mer motif encoding polynucleotide
aacatgggtccaatgggccgg

SEQ ID NO: 2634 - DNA, 21 bp, Artificial Sequence
  n-mer motif encoding polynucleotide
gttacccaatcgtccacgcta

SEQ ID NO: 2635 - DNA, 21 bp, Artificial Sequence
  n-mer motif encoding polynucleotide
attgatcgtagtgctagtttg

SEQ ID NO: 2636 - DNA, 21 bp, Artificial Sequence
  n-mer motif encoding polynucleotide
tctcatagtattacgggtctt

SEQ ID NO: 2637 - DNA, 21 bp, Artificial Sequence
  n-mer motif encoding polynucleotide
aaagcgggacaactagtggaa

SEQ ID NO: 2638 - DNA, 21 bp, Artificial Sequence
  n-mer motif encoding polynucleotide
agcggtgtatcagaaggaaac

SEQ ID NO: 2639 - DNA, 21 bp, Artificial Sequence
  n-mer motif encoding polynucleotide
acgcttacattatctaccctc

SEQ ID NO: 2640 - DNA, 21 bp, Artificial Sequence
  n-mer motif encoding polynucleotide
gcccacaacaaacacgaaagt

SEQ ID NO: 2641 - DNA, 21 bp, Artificial Sequence
  n-mer motif encoding polynucleotide
cacaacaacaacctgcaaaac

SEQ ID NO: 2642 - DNA, 21 bp, Artificial Sequence
  n-mer motif encoding polynucleotide
tataatgagtcttcgaatgcg

SEQ ID NO: 2643 - DNA, 21 bp, Artificial Sequence
  n-mer motif encoding polynucleotide
cgtgagcaggctgcggagagg

SEQ ID NO: 2644 - DNA, 21 bp, Artificial Sequence
  n-mer motif encoding polynucleotide
actcagtatggtactctgccg

SEQ ID NO: 2645 - DNA, 21 bp, Artificial Sequence
  n-mer motif encoding polynucleotide
catcctgggaatagttctgtg

SEQ ID NO: 2646 - DNA, 21 bp, Artificial Sequence
  n-mer motif encoding polynucleotide
agttctagggaggtgagtccg

SEQ ID NO: 2647 - DNA, 21 bp, Artificial Sequence
  n-mer motif encoding polynucleotide
gcaaactccacaagccaatgg

SEQ ID NO: 2648 - DNA, 21 bp, Artificial Sequence
  n-mer motif encoding polynucleotide
cgcgacatgatcaactcatca

SEQ ID NO: 2649 - DNA, 21 bp, Artificial Sequence
  n-mer motif encoding polynucleotide
gcattgcccagcggcgcacga

SEQ ID NO: 2650 - DNA, 21 bp, Artificial Sequence
  n-mer motif encoding polynucleotide
cctggcaccagtggatcccga

SEQ ID NO: 2651 - DNA, 21 bp, Artificial Sequence
  n-mer motif encoding polynucleotide
tggaacggaaacgccacacaa

SEQ ID NO: 2652 - DNA, 21 bp, Artificial Sequence
  n-mer motif encoding polynucleotide
ggtaaagcaaccttagtcctc

SEQ ID NO: 2653 - DNA, 21 bp, Artificial Sequence
  n-mer motif encoding polynucleotide
tacaccaacgggggccaccta

SEQ ID NO: 2654 - DNA, 21 bp, Artificial Sequence
  n-mer motif encoding polynucleotide
tcacaatacaacggaacgcaa

SEQ ID NO: 2655 - DNA, 21 bp, Artificial Sequence
  n-mer motif encoding polynucleotide
tattctagtgagagtgcttat

SEQ ID NO: 2656 - DNA, 21 bp, Artificial Sequence
  n-mer motif encoding polynucleotide
gttaaggcgggggtggctgat

SEQ ID NO: 2657 - DNA, 21 bp, Artificial Sequence
  n-mer motif encoding polynucleotide
acgatggggacggtgcagatt

SEQ ID NO: 2658 - DNA, 21 bp, Artificial Sequence
  n-mer motif encoding polynucleotide
ggtgtggctggtgcggtggtg

SEQ ID NO: 2659 - DNA, 21 bp, Artificial Sequence
  n-mer motif encoding polynucleotide
tatgataagactttgagtgtt

SEQ ID NO: 2660 - DNA, 21 bp, Artificial Sequence
  n-mer motif encoding polynucleotide
catgggagtgcgtattcgcag

SEQ ID NO: 2661 - DNA, 21 bp, Artificial Sequence
  n-mer motif encoding polynucleotide
acggctaatattatgagtaag

SEQ ID NO: 2662 - DNA, 21 bp, Artificial Sequence
  n-mer motif encoding polynucleotide
ttttcgcgggagacgctggcg

SEQ ID NO: 2663 - DNA, 21 bp, Artificial Sequence
  n-mer motif encoding polynucleotide
ttgagtggtgctggtagtcag

SEQ ID NO: 2664 - DNA, 21 bp, Artificial Sequence
  n-mer motif encoding polynucleotide
agtaatgcgaatcagatgagt

SEQ ID NO: 2665 - DNA, 21 bp, Artificial Sequence
  n-mer motif encoding polynucleotide
tcggtcctttcgccttcgaac

SEQ ID NO: 2666 - DNA, 21 bp, Artificial Sequence
  n-mer motif encoding polynucleotide
gataatgtgcatgggcaggtg

SEQ ID NO: 2667 - DNA, 21 bp, Artificial Sequence
  n-mer motif encoding polynucleotide
gacggacgagaatacgcctcg

SEQ ID NO: 2668 - DNA, 21 bp, Artificial Sequence
  n-mer motif encoding polynucleotide
atttcgaatcagattaagatg

SEQ ID NO: 2669 - DNA, 21 bp, Artificial Sequence
  n-mer motif encoding polynucleotide
ggtcgagacaaccaacacgta

SEQ ID NO: 2670 - DNA, 21 bp, Artificial Sequence
  n-mer motif encoding polynucleotide
cgtaatcatgagactggggct

SEQ ID NO: 2671 - DNA, 21 bp, Artificial Sequence
  n-mer motif encoding polynucleotide
agtgggagtggtgcgaatatt

SEQ ID NO: 2672 - DNA, 21 bp, Artificial Sequence
  n-mer motif encoding polynucleotide
tctatgtctgatgggcttcgg

SEQ ID NO: 2673 - DNA, 21 bp, Artificial Sequence
  n-mer motif encoding polynucleotide
aaggagagtagtgctatggag

SEQ ID NO: 2674 - DNA, 21 bp, Artificial Sequence
  n-mer motif encoding polynucleotide
gctaatgctagtactagtctg

SEQ ID NO: 2675 - DNA, 21 bp, Artificial Sequence
  n-mer motif encoding polynucleotide
agtgcttctggttatttggtt

SEQ ID NO: 2676 - DNA, 21 bp, Artificial Sequence
  n-mer motif encoding polynucleotide
gatactactcagaagcctcat

SEQ ID NO: 2677 - DNA, 21 bp, Artificial Sequence
  n-mer motif encoding polynucleotide
ctaatacgaggttccatggaa

SEQ ID NO: 2678 - DNA, 21 bp, Artificial Sequence
  n-mer motif encoding polynucleotide
gaccgcacctactcaaacaca

SEQ ID NO: 2679 - DNA, 21 bp, Artificial Sequence
  n-mer motif encoding polynucleotide
gctcttgggcatcaggggaat

SEQ ID NO: 2680 - DNA, 21 bp, Artificial Sequence
  n-mer motif encoding polynucleotide
gctaatcatacgtcgcaggag

SEQ ID NO: 2681 - DNA, 21 bp, Artificial Sequence
  n-mer motif encoding polynucleotide
gagaggggtttgaatactaat

SEQ ID NO: 2682 - DNA, 21 bp, Artificial Sequence
  n-mer motif encoding polynucleotide
actgttggtggtaatcatcat

SEQ ID NO: 2683 - DNA, 21 bp, Artificial Sequence
  n-mer motif encoding polynucleotide
ccgagtgataggactacttat

SEQ ID NO: 2684 - DNA, 21 bp, Artificial Sequence
  n-mer motif encoding polynucleotide
tccaggcaagaaaacttctcc

SEQ ID NO: 2685 - DNA, 21 bp, Artificial Sequence
  n-mer motif encoding polynucleotide
aataagacgacgatggagttt

SEQ ID NO: 2686 - DNA, 21 bp, Artificial Sequence
  n-mer motif encoding polynucleotide
aaacacacagaaaacgggacc

SEQ ID NO: 2687 - DNA, 21 bp, Artificial Sequence
  n-mer motif encoding polynucleotide
gaaaccggagctatgacctct

SEQ ID NO: 2688 - DNA, 21 bp, Artificial Sequence
  n-mer motif encoding polynucleotide
ggtcatagggattcgggtggt

SEQ ID NO: 2689 - DNA, 21 bp, Artificial Sequence
  n-mer motif encoding polynucleotide
agaaacgccgaaggcggattg

SEQ ID NO: 2690 - DNA, 21 bp, Artificial Sequence
  n-mer motif encoding polynucleotide
gggcagcgtacgacgaatgat

SEQ ID NO: 2691 - DNA, 21 bp, Artificial Sequence
  n-mer motif encoding polynucleotide
tataatgatgctcttaggccg

SEQ ID NO: 2692 - DNA, 21 bp, Artificial Sequence
  n-mer motif encoding polynucleotide
gggtatgcgactacggttcag

SEQ ID NO: 2693 - DNA, 21 bp, Artificial Sequence
  n-mer motif encoding polynucleotide
atagggggaggcataggaaac

SEQ ID NO: 2694 - DNA, 21 bp, Artificial Sequence
  n-mer motif encoding polynucleotide
gtggcggtgtctaatacgcct

SEQ ID NO: 2695 - DNA, 21 bp, Artificial Sequence
  n-mer motif encoding polynucleotide
cttgcgaatggtatgacggct

SEQ ID NO: 2696 - DNA, 21 bp, Artificial Sequence
  n-mer motif encoding polynucleotide
atttctgggtcgtcgtctctt

SEQ ID NO: 2697 - DNA, 21 bp, Artificial Sequence
  n-mer motif encoding polynucleotide
tctaatgttcatgttgttaat

SEQ ID NO: 2698 - DNA, 21 bp, Artificial Sequence
  n-mer motif encoding polynucleotide
gtggagacttcgcgtctgtat

SEQ ID NO: 2699 - DNA, 21 bp, Artificial Sequence
  n-mer motif encoding polynucleotide
tcgaacgcagacatcctcgcc

SEQ ID NO: 2700 - DNA, 21 bp, Artificial Sequence
  n-mer motif encoding polynucleotide
aacaacgtaaacccgtactcg

SEQ ID NO: 2701 - DNA, 21 bp, Artificial Sequence
  n-mer motif encoding polynucleotide
ataagtgtaggtgtgtccgta

SEQ ID NO: 2702 - DNA, 21 bp, Artificial Sequence
  n-mer motif encoding polynucleotide
tccgcaaacaacatagccccc

SEQ ID NO: 2703 - DNA, 21 bp, Artificial Sequence
  n-mer motif encoding polynucleotide
ggtgttcagatgactgcgggg

SEQ ID NO: 2704 - DNA, 21 bp, Artificial Sequence
  n-mer motif encoding polynucleotide
cgttacatcgccaaccaaaca

SEQ ID NO: 2705 - DNA, 21 bp, Artificial Sequence
  n-mer motif encoding polynucleotide
accaccgaaagtctacacctt

SEQ ID NO: 2706 - DNA, 21 bp, Artificial Sequence
  n-mer motif encoding polynucleotide
ggctaccaagacaaaacacga

SEQ ID NO: 2707 - DNA, 21 bp, Artificial Sequence
  n-mer motif encoding polynucleotide
gcttcgcggcctgcggctcag

SEQ ID NO: 2708 - DNA, 21 bp, Artificial Sequence
  n-mer motif encoding polynucleotide
tctattcaggagctgttgagg

SEQ ID NO: 2709 - DNA, 21 bp, Artificial Sequence
  n-mer motif encoding polynucleotide
actgtgcgttcgcctcagcag

SEQ ID NO: 2710 - DNA, 21 bp, Artificial Sequence
  n-mer motif encoding polynucleotide
gcggttcttggtggtagtaat

SEQ ID NO: 2711 - DNA, 21 bp, Artificial Sequence
  n-mer motif encoding polynucleotide
atgagtacggttcttcgggag

SEQ ID NO: 2712 - DNA, 21 bp, Artificial Sequence
  n-mer motif encoding polynucleotide
acttatggtattactcatgat

SEQ ID NO: 2713 - DNA, 21 bp, Artificial Sequence
  n-mer motif encoding polynucleotide
gatgcgaatgcgggtacgagg

SEQ ID NO: 2714 - DNA, 21 bp, Artificial Sequence
  n-mer motif encoding polynucleotide
ttcaacgggtacgtcatggca

SEQ ID NO: 2715 - DNA, 21 bp, Artificial Sequence
  n-mer motif encoding polynucleotide
attaataattttaatactctg

SEQ ID NO: 2716 - DNA, 21 bp, Artificial Sequence
  n-mer motif encoding polynucleotide
gtagccaacgaacgcctaccg

SEQ ID NO: 2717 - DNA, 21 bp, Artificial Sequence
  n-mer motif encoding polynucleotide
actaattctaatcagggttcg

SEQ ID NO: 2718 - DNA, 21 bp, Artificial Sequence
  n-mer motif encoding polynucleotide
gcgacgctgaataatagttat

SEQ ID NO: 2719 - DNA, 21 bp, Artificial Sequence
  n-mer motif encoding polynucleotide
aaaaacgctcaaatagaccta

SEQ ID NO: 2720 - DNA, 21 bp, Artificial Sequence
  n-mer motif encoding polynucleotide
cctgctacgctacacctgaca

SEQ ID NO: 2721 - DNA, 21 bp, Artificial Sequence
  n-mer motif encoding polynucleotide
ttaggatcgagcacagtatcg

SEQ ID NO: 2722 - DNA, 21 bp, Artificial Sequence
  n-mer motif encoding polynucleotide
aattggaattctgagggtacg

SEQ ID NO: 2723 - DNA, 21 bp, Artificial Sequence
  n-mer motif encoding polynucleotide
ccaacaaacaacttaagtatg

SEQ ID NO: 2724 - DNA, 21 bp, Artificial Sequence
  n-mer motif encoding polynucleotide
gcgcttaagccgaattctacg

SEQ ID NO: 2725 - DNA, 21 bp, Artificial Sequence
  n-mer motif encoding polynucleotide
atggtgaattcggagaatact

SEQ ID NO: 2726 - DNA, 21 bp, Artificial Sequence
  n-mer motif encoding polynucleotide
agtatggatgctcggttgacg

SEQ ID NO: 2727 - DNA, 21 bp, Artificial Sequence
  n-mer motif encoding polynucleotide
aataatgttgttagggatgat

SEQ ID NO: 2728 - DNA, 21 bp, Artificial Sequence
  n-mer motif encoding polynucleotide
acaagggaccaaaggtctaca

SEQ ID NO: 2729 - DNA, 21 bp, Artificial Sequence
  n-mer motif encoding polynucleotide
gctgacatccggaacgacaaa

SEQ ID NO: 2730 - DNA, 21 bp, Artificial Sequence
  n-mer motif encoding polynucleotide
atgcgggataagattaatccg

SEQ ID NO: 2731 - DNA, 21 bp, Artificial Sequence
  n-mer motif encoding polynucleotide
ccgactcctaatgagcatatg

SEQ ID NO: 2732 - DNA, 21 bp, Artificial Sequence
  n-mer motif encoding polynucleotide
ggatactcacacaactccgac

SEQ ID NO: 2733 - DNA, 21 bp, Artificial Sequence
  n-mer motif encoding polynucleotide
cttcgggatgggattgcttct

SEQ ID NO: 2734 - DNA, 21 bp, Artificial Sequence
  n-mer motif encoding polynucleotide
atgaaccaaatgggcggcctg

SEQ ID NO: 2735 - DNA, 21 bp, Artificial Sequence
  n-mer motif encoding polynucleotide
tcttcgcctactaagggtact

SEQ ID NO: 2736 - DNA, 21 bp, Artificial Sequence
  n-mer motif encoding polynucleotide
tatttggataatccgttgacg

SEQ ID NO: 2737 - DNA, 21 bp, Artificial Sequence
  n-mer motif encoding polynucleotide
gtcatgcaacgatctgcacaa

SEQ ID NO: 2738 - DNA, 21 bp, Artificial Sequence
  n-mer motif encoding polynucleotide
tctctgcaactcacagcgggt

SEQ ID NO: 2739 - DNA, 21 bp, Artificial Sequence
  n-mer motif encoding polynucleotide
gtggggtctgggggttataat

SEQ ID NO: 2740 - DNA, 21 bp, Artificial Sequence
  n-mer motif encoding polynucleotide
gatcgtccgaataatgtgtcg

SEQ ID NO: 2741 - DNA, 21 bp, Artificial Sequence
  n-mer motif encoding polynucleotide
ttgactgagaaggcttctatt

SEQ ID NO: 2742 - DNA, 21 bp, Artificial Sequence
  n-mer motif encoding polynucleotide
accacaaaaacgacatctatg

SEQ ID NO: 2743 - DNA, 21 bp, Artificial Sequence
  n-mer motif encoding polynucleotide
cgtttggacctgcaagtccac

SEQ ID NO: 2744 - DNA, 21 bp, Artificial Sequence
  n-mer motif encoding polynucleotide
actcatgtgattggggctgtg

SEQ ID NO: 2745 - DNA, 21 bp, Artificial Sequence
  n-mer motif encoding polynucleotide
accctgacacacctaaaccca

SEQ ID NO: 2746 - DNA, 21 bp, Artificial Sequence
  n-mer motif encoding polynucleotide
acctcaatatcgtcgcaaagc

SEQ ID NO: 2747 - DNA, 21 bp, Artificial Sequence
  n-mer motif encoding polynucleotide
taccacacccaccaagtcgca

SEQ ID NO: 2748 - DNA, 21 bp, Artificial Sequence
  n-mer motif encoding polynucleotide
atgcaagggcttaacaacatg

SEQ ID NO: 2749 - DNA, 21 bp, Artificial Sequence
  n-mer motif encoding polynucleotide
ggtagtgcgagtaatagtggt

SEQ ID NO: 2750 - DNA, 21 bp, Artificial Sequence
  n-mer motif encoding polynucleotide
gcgaatactacggggcaggtg

SEQ ID NO: 2751 - DNA, 21 bp, Artificial Sequence
  n-mer motif encoding polynucleotide
agcgttgtcaacaccaacatc

SEQ ID NO: 2752 - DNA, 21 bp, Artificial Sequence
  n-mer motif encoding polynucleotide
tctaataatctgaatcaggag

SEQ ID NO: 2753 - DNA, 21 bp, Artificial Sequence
  n-mer motif encoding polynucleotide
atgaatgggagtgggatgcag

SEQ ID NO: 2754 - DNA, 21 bp, Artificial Sequence
  n-mer motif encoding polynucleotide
ataagtcacgaccttaaatac

SEQ ID NO: 2755 - DNA, 21 bp, Artificial Sequence
  n-mer motif encoding polynucleotide
acggttaatgcggatgggtcg

SEQ ID NO: 2756 - DNA, 21 bp, Artificial Sequence
  n-mer motif encoding polynucleotide
aatcatattaggaatcctatg

SEQ ID NO: 2757 - DNA, 21 bp, Artificial Sequence
  n-mer motif encoding polynucleotide
agtacgcgggttactctggat

SEQ ID NO: 2758 - DNA, 21 bp, Artificial Sequence
  n-mer motif encoding polynucleotide
gctatgggagcactcgtgcac

SEQ ID NO: 2759 - DNA, 21 bp, Artificial Sequence
  n-mer motif encoding polynucleotide
gcgcaagccatgtcaaacagc

SEQ ID NO: 2760 - DNA, 21 bp, Artificial Sequence
  n-mer motif encoding polynucleotide
aatgctaatggtatgaatact

SEQ ID NO: 2761 - DNA, 21 bp, Artificial Sequence
  n-mer motif encoding polynucleotide
ttgacgcttcctagtgctaat

SEQ ID NO: 2762 - DNA, 21 bp, Artificial Sequence
  n-mer motif encoding polynucleotide
taccaaacgggagacaaagac

SEQ ID NO: 2763 - DNA, 21 bp, Artificial Sequence
  n-mer motif encoding polynucleotide
agacgggaagaaaacgtcaac

SEQ ID NO: 2764 - DNA, 21 bp, Artificial Sequence
  n-mer motif encoding polynucleotide
ggaactaccacggcagtcgcg

SEQ ID NO: 2765 - DNA, 21 bp, Artificial Sequence
  n-mer motif encoding polynucleotide
acggctggtggggagcgtgcg

SEQ ID NO: 2766 - DNA, 21 bp, Artificial Sequence
  n-mer motif encoding polynucleotide
gccggtaacgaacctagaccc

SEQ ID NO: 2767 - DNA, 21 bp, Artificial Sequence
  n-mer motif encoding polynucleotide
gcaaacaacacagccaacagt

SEQ ID NO: 2768 - DNA, 21 bp, Artificial Sequence
  n-mer motif encoding polynucleotide
catgtgaatagtagggatctt

SEQ ID NO: 2769 - DNA, 21 bp, Artificial Sequence
  n-mer motif encoding polynucleotide
acataccaactttccggcaac

SEQ ID NO: 2770 - DNA, 21 bp, Artificial Sequence
  n-mer motif encoding polynucleotide
cggggtgattcgatggctcgg

SEQ ID NO: 2771 - DNA, 21 bp, Artificial Sequence
  n-mer motif encoding polynucleotide
ttgaataattctgcgactgtt

SEQ ID NO: 2772 - DNA, 21 bp, Artificial Sequence
  n-mer motif encoding polynucleotide
ctacacgctaacaacgaacgg

SEQ ID NO: 2773 - DNA, 21 bp, Artificial Sequence
  n-mer motif encoding polynucleotide
atgggttctacgactggtgtg

SEQ ID NO: 2774 - DNA, 21 bp, Artificial Sequence
  n-mer motif encoding polynucleotide
gtagttgcagggcacgcaatg

SEQ ID NO: 2775 - DNA, 21 bp, Artificial Sequence
  n-mer motif encoding polynucleotide
ggcaacgaaaaaccatcaggg

SEQ ID NO: 2776 - DNA, 21 bp, Artificial Sequence
  n-mer motif encoding polynucleotide
cgtggtacggaggggacgccg

SEQ ID NO: 2777 - DNA, 21 bp, Artificial Sequence
  n-mer motif encoding polynucleotide
tggtcccccggacccgaagcc

SEQ ID NO: 2778 - DNA, 21 bp, Artificial Sequence
  n-mer motif encoding polynucleotide
attaatgtgaatcagatggcg

SEQ ID NO: 2779 - DNA, 21 bp, Artificial Sequence
  n-mer motif encoding polynucleotide
cggtcggacgttatgcaaagt

SEQ ID NO: 2780 - DNA, 21 bp, Artificial Sequence
  n-mer motif encoding polynucleotide
agggacgtaagtacaaaagaa

SEQ ID NO: 2781 - DNA, 21 bp, Artificial Sequence
  n-mer motif encoding polynucleotide
aaaaagtcacccagacttgaa

SEQ ID NO: 2782 - DNA, 21 bp, Artificial Sequence
  n-mer motif encoding polynucleotide
acgagcaacacaatgtcagac

SEQ ID NO: 2783 - DNA, 21 bp, Artificial Sequence
  n-mer motif encoding polynucleotide
tctaaaggaaacgaacaaatg

SEQ ID NO: 2784 - DNA, 21 bp, Artificial Sequence
  n-mer motif encoding polynucleotide
ggttacgctacgaccgtgcaa

SEQ ID NO: 2785 - DNA, 21 bp, Artificial Sequence
  n-mer motif encoding polynucleotide
ggatacatgtctaacgtcata

SEQ ID NO: 2786 - DNA, 21 bp, Artificial Sequence
  n-mer motif encoding polynucleotide
gtgactgttagtctggatggg

SEQ ID NO: 2787 - DNA, 21 bp, Artificial Sequence
  n-mer motif encoding polynucleotide
acgaataatttgctggctcag

SEQ ID NO: 2788 - DNA, 21 bp, Artificial Sequence
  n-mer motif encoding polynucleotide
gcgcagacgacggggtatacg

SEQ ID NO: 2789 - DNA, 21 bp, Artificial Sequence
  n-mer motif encoding polynucleotide
agtaagtcgactgagattatg

SEQ ID NO: 2790 - DNA, 21 bp, Artificial Sequence
  n-mer motif encoding polynucleotide
tctgcgatgcacacattagtc

SEQ ID NO: 2791 - DNA, 21 bp, Artificial Sequence
  n-mer motif encoding polynucleotide
gctggggtgcgtgagtcgttt

SEQ ID NO: 2792 - DNA, 21 bp, Artificial Sequence
  n-mer motif encoding polynucleotide
caaggcaactcaatggcgtcc

SEQ ID NO: 2793 - DNA, 21 bp, Artificial Sequence
  n-mer motif encoding polynucleotide
aaaaacccgagtgtccaagaa

SEQ ID NO: 2794 - DNA, 21 bp, Artificial Sequence
  n-mer motif encoding polynucleotide
cccataacacgggaatcggga

SEQ ID NO: 2795 - DNA, 21 bp, Artificial Sequence
  n-mer motif encoding polynucleotide
agccgctcggcagaaatatcg

SEQ ID NO: 2796 - DNA, 21 bp, Artificial Sequence
  n-mer motif encoding polynucleotide
aacgacatccccacacgagcc

SEQ ID NO: 2797 - DNA, 21 bp, Artificial Sequence
  n-mer motif encoding polynucleotide
gcatacggatcgtccggaaga

SEQ ID NO: 2798 - DNA, 21 bp, Artificial Sequence
  n-mer motif encoding polynucleotide
cttcatgggaattttagtcag

SEQ ID NO: 2799 - DNA, 21 bp, Artificial Sequence
  n-mer motif encoding polynucleotide
gcatccaacgggcaagttaac

SEQ ID NO: 2800 - DNA, 21 bp, Artificial Sequence
  n-mer motif encoding polynucleotide
cagaaggggacggttactctg

SEQ ID NO: 2801 - DNA, 21 bp, Artificial Sequence
  n-mer motif encoding polynucleotide
aactctagtaacactggttgg

SEQ ID NO: 2802 - DNA, 21 bp, Artificial Sequence
  n-mer motif encoding polynucleotide
acgtatcagcatcagggtccg

SEQ ID NO: 2803 - DNA, 21 bp, Artificial Sequence
  n-mer motif encoding polynucleotide
gacggggtcgcacaccgctca

SEQ ID NO: 2804 - DNA, 21 bp, Artificial Sequence
  n-mer motif encoding polynucleotide
gacgggctcacgctggaacgc

SEQ ID NO: 2805 - DNA, 21 bp, Artificial Sequence
  n-mer motif encoding polynucleotide
aggggtgatctatctacgcct

SEQ ID NO: 2806 - DNA, 21 bp, Artificial Sequence
  n-mer motif encoding polynucleotide
attaatgagattggtaggatg

SEQ ID NO: 2807 - DNA, 21 bp, Artificial Sequence
  n-mer motif encoding polynucleotide
ccccaatggggaactgacccg

SEQ ID NO: 2808 - DNA, 21 bp, Artificial Sequence
  n-mer motif encoding polynucleotide
aagcaggtggcgcatattgat

SEQ ID NO: 2809 - DNA, 21 bp, Artificial Sequence
  n-mer motif encoding polynucleotide
aatactttgcagaatagtcat

SEQ ID NO: 2810 - DNA, 21 bp, Artificial Sequence
  n-mer motif encoding polynucleotide
tggagccaagggaacacagcg

SEQ ID NO: 2811 - DNA, 21 bp, Artificial Sequence
  n-mer motif encoding polynucleotide
aacgaaacgcacgtacctaaa

SEQ ID NO: 2812 - DNA, 21 bp, Artificial Sequence
  n-mer motif encoding polynucleotide
gtaacgaacgaatcccgcgcc

SEQ ID NO: 2813 - DNA, 21 bp, Artificial Sequence
  n-mer motif encoding polynucleotide
cccgaaggccacatgcaagac

SEQ ID NO: 2814 - DNA, 21 bp, Artificial Sequence
  n-mer motif encoding polynucleotide
ttggattcgactaattctagg

SEQ ID NO: 2815 - DNA, 21 bp, Artificial Sequence
  n-mer motif encoding polynucleotide
cagtcgattgggcatccggtg

SEQ ID NO: 2816 - DNA, 21 bp, Artificial Sequence
  n-mer motif encoding polynucleotide
gtcctggttaacgtacacaac

SEQ ID NO: 2817 - DNA, 21 bp, Artificial Sequence
  n-mer motif encoding polynucleotide
gtgcataatcctactactacg

SEQ ID NO: 2818 - DNA, 21 bp, Artificial Sequence
  n-mer motif encoding polynucleotide
ggggataaggcgagtttggcg

SEQ ID NO: 2819 - DNA, 21 bp, Artificial Sequence
  n-mer motif encoding polynucleotide
ctaaacgaatcccgagcgtcg

SEQ ID NO: 2820 - DNA, 21 bp, Artificial Sequence
  n-mer motif encoding polynucleotide
ggttttcatattaatggtgag

SEQ ID NO: 2821 - DNA, 21 bp, Artificial Sequence
  n-mer motif encoding polynucleotide
agtgttagttctgtggtgttg

SEQ ID NO: 2822 - DNA, 21 bp, Artificial Sequence
  n-mer motif encoding polynucleotide
ctttcgactacttcgacgaag

SEQ ID NO: 2823 - DNA, 21 bp, Artificial Sequence
  n-mer motif encoding polynucleotide
actaatacgcagaataatccg

SEQ ID NO: 2824 - DNA, 21 bp, Artificial Sequence
  n-mer motif encoding polynucleotide
actaatcttgctgttacgctg

SEQ ID NO: 2825 - DNA, 21 bp, Artificial Sequence
  n-mer motif encoding polynucleotide
atgtcggatcgtacttctgat

SEQ ID NO: 2826 - DNA, 21 bp, Artificial Sequence
  n-mer motif encoding polynucleotide
tccgcgcaatctttcgtagtt

SEQ ID NO: 2827 - DNA, 21 bp, Artificial Sequence
  n-mer motif encoding polynucleotide
atgcacacaagtagaccccca

SEQ ID NO: 2828 - DNA, 21 bp, Artificial Sequence
  n-mer motif encoding polynucleotide
atgtctagccacacagtccaa

SEQ ID NO: 2829 - DNA, 21 bp, Artificial Sequence
  n-mer motif encoding polynucleotide
agggatacggctaagggggtg

SEQ ID NO: 2830 - DNA, 21 bp, Artificial Sequence
  n-mer motif encoding polynucleotide
gcgttaaaatccgacagcgcc

SEQ ID NO: 2831 - DNA, 21 bp, Artificial Sequence
  n-mer motif encoding polynucleotide
caatacgacgccagccgacaa

SEQ ID NO: 2832 - DNA, 21 bp, Artificial Sequence
  n-mer motif encoding polynucleotide
ttagccgactcaaacagcaaa

SEQ ID NO: 2833 - DNA, 21 bp, Artificial Sequence
  n-mer motif encoding polynucleotide
tttcagttggctagtaatccg

SEQ ID NO: 2834 - DNA, 21 bp, Artificial Sequence
  n-mer motif encoding polynucleotide
aactctgtcgtagggaacatc

SEQ ID NO: 2835 - DNA, 21 bp, Artificial Sequence
  n-mer motif encoding polynucleotide
aggtatgagagtactagtgct

SEQ ID NO: 2836 - DNA, 21 bp, Artificial Sequence
  n-mer motif encoding polynucleotide
gcggatcataatcatattgct

SEQ ID NO: 2837 - DNA, 21 bp, Artificial Sequence
  n-mer motif encoding polynucleotide
gtaggcgaccaatcccgcccg

SEQ ID NO: 2838 - DNA, 21 bp, Artificial Sequence
  n-mer motif encoding polynucleotide
ttcaacgaaactgccgggcga

SEQ ID NO: 2839 - DNA, 21 bp, Artificial Sequence
  n-mer motif encoding polynucleotide
agcaactcgtacttactcaac

SEQ ID NO: 2840 - DNA, 21 bp, Artificial Sequence
  n-mer motif encoding polynucleotide
cgaggcgacacaaagaactac

SEQ ID NO: 2841 - DNA, 21 bp, Artificial Sequence
  n-mer motif encoding polynucleotide
acgactactactatggcatac

SEQ ID NO: 2842 - DNA, 21 bp, Artificial Sequence
  n-mer motif encoding polynucleotide
cgacccccgaacgaaaacaga

SEQ ID NO: 2843 - DNA, 21 bp, Artificial Sequence
  n-mer motif encoding polynucleotide
tgcgccaacatgaccaacggc

SEQ ID NO: 2844 - DNA, 21 bp, Artificial Sequence
  n-mer motif encoding polynucleotide
aatcggtcggatagttttgcg

SEQ ID NO: 2845 - DNA, 21 bp, Artificial Sequence
  n-mer motif encoding polynucleotide
aatcttttgacttcgtcgcct

SEQ ID NO: 2846 - DNA, 21 bp, Artificial Sequence
  n-mer motif encoding polynucleotide
aactccagggaaatgggtgta

SEQ ID NO: 2847 - DNA, 21 bp, Artificial Sequence
  n-mer motif encoding polynucleotide
atggggaatcagagtggtgcg

SEQ ID NO: 2848 - DNA, 21 bp, Artificial Sequence
  n-mer motif encoding polynucleotide
atgctcacagaaaccaaagca

SEQ ID NO: 2849 - DNA, 21 bp, Artificial Sequence
  n-mer motif encoding polynucleotide
caaaacatcaaaaacatgaca

SEQ ID NO: 2850 - DNA, 21 bp, Artificial Sequence
  n-mer motif encoding polynucleotide
atgagtacggttcttcgcgag

SEQ ID NO: 2851 - DNA, 21 bp, Artificial Sequence
  n-mer motif encoding polynucleotide
gaccgtgcccaaaacaacgaa

SEQ ID NO: 2852 - DNA, 21 bp, Artificial Sequence
  n-mer motif encoding polynucleotide
catacgcagtcgacgggttat

SEQ ID NO: 2853 - DNA, 21 bp, Artificial Sequence
  n-mer motif encoding polynucleotide
atgagtgtggggaaggtttat

SEQ ID NO: 2854 - DNA, 21 bp, Artificial Sequence
  n-mer motif encoding polynucleotide
gccggaaactaccaatcatca

SEQ ID NO: 2855 - DNA, 21 bp, Artificial Sequence
  n-mer motif encoding polynucleotide
agaaacgaaaacgtaaacgct

SEQ ID NO: 2856 - DNA, 21 bp, Artificial Sequence
  n-mer motif encoding polynucleotide
gacacccaccacacatccagt

SEQ ID NO: 2857 - DNA, 21 bp, Artificial Sequence
  n-mer motif encoding polynucleotide
actagctcccctgttctacaa

SEQ ID NO: 2858 - DNA, 21 bp, Artificial Sequence
  n-mer motif encoding polynucleotide
gtgggccgtgacgcagaagct

SEQ ID NO: 2859 - DNA, 21 bp, Artificial Sequence
  n-mer motif encoding polynucleotide
aacatggaaagaggatcgcaa

SEQ ID NO: 2860 - DNA, 21 bp, Artificial Sequence
  n-mer motif encoding polynucleotide
gacagacaaacaggccaaaaa

SEQ ID NO: 2861 - DNA, 21 bp, Artificial Sequence
  n-mer motif encoding polynucleotide
gtcttccgggaaggcatcgtg

SEQ ID NO: 2862 - DNA, 21 bp, Artificial Sequence
  n-mer motif encoding polynucleotide
tccgcaaacaacatagccacc

SEQ ID NO: 2863 - DNA, 21 bp, Artificial Sequence
  n-mer motif encoding polynucleotide
gtatcagaaggacaacgaatc

SEQ ID NO: 2864 - DNA, 21 bp, Artificial Sequence
  n-mer motif encoding polynucleotide
cactacggtaacaaagacata

SEQ ID NO: 2865 - DNA, 21 bp, Artificial Sequence
  n-mer motif encoding polynucleotide
gatgttttgcttaagaatttt

SEQ ID NO: 2866 - DNA, 21 bp, Artificial Sequence
  n-mer motif encoding polynucleotide
cacacggttcaaatacgcgaa

SEQ ID NO: 2867 - DNA, 21 bp, Artificial Sequence
  n-mer motif encoding polynucleotide
acatcagcactagcacaccaa

SEQ ID NO: 2868 - DNA, 21 bp, Artificial Sequence
  n-mer motif encoding polynucleotide
atcccaaccggccaaactagc

SEQ ID NO: 2869 - DNA, 21 bp, Artificial Sequence
  n-mer motif encoding polynucleotide
cgcagcgacaaaggaacgttg

SEQ ID NO: 2870 - DNA, 21 bp, Artificial Sequence
  n-mer motif encoding polynucleotide
aatggtcttacggttcagcgg

SEQ ID NO: 2871 - DNA, 21 bp, Artificial Sequence
  n-mer motif encoding polynucleotide
acggttgagggttcttatccg

SEQ ID NO: 2872 - DNA, 21 bp, Artificial Sequence
  n-mer motif encoding polynucleotide
actagccacttagtacttgca

SEQ ID NO: 2873 - DNA, 21 bp, Artificial Sequence
  n-mer motif encoding polynucleotide
aatcatagtctgtcggagcat

SEQ ID NO: 2874 - DNA, 21 bp, Artificial Sequence
  n-mer motif encoding polynucleotide
ttaacaggcatgaacagagac

SEQ ID NO: 2875 - DNA, 21 bp, Artificial Sequence
  n-mer motif encoding polynucleotide
agtcacaacgctggggtcgcc

SEQ ID NO: 2876 - DNA, 21 bp, Artificial Sequence
  n-mer motif encoding polynucleotide
gcgcaccaaaccgccgggcca

SEQ ID NO: 2877 - DNA, 21 bp, Artificial Sequence
  n-mer motif encoding polynucleotide
aattctcatgatttgaagtat

SEQ ID NO: 2878 - DNA, 21 bp, Artificial Sequence
  n-mer motif encoding polynucleotide
actacaatgagtaccggtcaa

SEQ ID NO: 2879 - DNA, 21 bp, Artificial Sequence
  n-mer motif encoding polynucleotide
gggttcgggcacgtgcccgaa

SEQ ID NO: 2880 - DNA, 21 bp, Artificial Sequence
  n-mer motif encoding polynucleotide
atcaccgccgcgtcaccgcaa

SEQ ID NO: 2881 - DNA, 21 bp, Artificial Sequence
  n-mer motif encoding polynucleotide
gttaaggcgagtgctggggat

SEQ ID NO: 2882 - DNA, 21 bp, Artificial Sequence
  n-mer motif encoding polynucleotide
agtatcacacacagcaacacc

SEQ ID NO: 2883 - DNA, 21 bp, Artificial Sequence
  n-mer motif encoding polynucleotide
cataataataatatgctgaat

SEQ ID NO: 2884 - DNA, 21 bp, Artificial Sequence
  n-mer motif encoding polynucleotide
cccaaaactctaacttcgaca

SEQ ID NO: 2885 - DNA, 21 bp, Artificial Sequence
  n-mer motif encoding polynucleotide
ataaccggcaacaccgtcgga

SEQ ID NO: 2886 - DNA, 21 bp, Artificial Sequence
  n-mer motif encoding polynucleotide
ctcggaaaccactacacaccc

SEQ ID NO: 2887 - DNA, 21 bp, Artificial Sequence
  n-mer motif encoding polynucleotide
tcgtttactaatacgaatcct

SEQ ID NO: 2888 - DNA, 21 bp, Artificial Sequence
  n-mer motif encoding polynucleotide
acgttggatcggaatcagact

SEQ ID NO: 2889 - DNA, 21 bp, Artificial Sequence
  n-mer motif encoding polynucleotide
atctctacgcaaagaccgcac

SEQ ID NO: 2890 - DNA, 21 bp, Artificial Sequence
  n-mer motif encoding polynucleotide
acattcactactctgggcaaa

SEQ ID NO: 2891 - DNA, 21 bp, Artificial Sequence
  n-mer motif encoding polynucleotide
gagaagccttctcttgtgatg

SEQ ID NO: 2892 - DNA, 21 bp, Artificial Sequence
  n-mer motif encoding polynucleotide
cacatcgaaaccaacacttcg

SEQ ID NO: 2893 - DNA, 21 bp, Artificial Sequence
  n-mer motif encoding polynucleotide
ggtacgaaggatattctgatt

SEQ ID NO: 2894 - DNA, 21 bp, Artificial Sequence
  n-mer motif encoding polynucleotide
gcgacttttagtcatgctggt

SEQ ID NO: 2895 - DNA, 21 bp, Artificial Sequence
  n-mer motif encoding polynucleotide
gccaacggcatattccaaccg

SEQ ID NO: 2896 - DNA, 21 bp, Artificial Sequence
  n-mer motif encoding polynucleotide
cttaatgtgaatacgcttaat

SEQ ID NO: 2897 - DNA, 21 bp, Artificial Sequence
  n-mer motif encoding polynucleotide
acttctgctagtgagaattgg

SEQ ID NO: 2898 - DNA, 21 bp, Artificial Sequence
  n-mer motif encoding polynucleotide
cttcttcagggtgcgactaag

SEQ ID NO: 2899 - DNA, 21 bp, Artificial Sequence
  n-mer motif encoding polynucleotide
gctcttgagactactcgtgct

SEQ ID NO: 2900 - DNA, 21 bp, Artificial Sequence
  n-mer motif encoding polynucleotide
ttaacgggacaaaacgaattc

SEQ ID NO: 2901 - DNA, 21 bp, Artificial Sequence
  n-mer motif encoding polynucleotide
atttctcatgatttgaagaat

SEQ ID NO: 2902 - DNA, 21 bp, Artificial Sequence
  n-mer motif encoding polynucleotide
gcacaatacaacaacggcgta

SEQ ID NO: 2903 - DNA, 21 bp, Artificial Sequence
  n-mer motif encoding polynucleotide
acgacgtctgtggagaagact

SEQ ID NO: 2904 - DNA, 21 bp, Artificial Sequence
  n-mer motif encoding polynucleotide
ggtacgtcggctattatgcct

SEQ ID NO: 2905 - DNA, 21 bp, Artificial Sequence
  n-mer motif encoding polynucleotide
cagctgcaggggactgaggcg

SEQ ID NO: 2906 - DNA, 21 bp, Artificial Sequence
  n-mer motif encoding polynucleotide
gccttaaaatcccaagaacca

SEQ ID NO: 2907 - DNA, 21 bp, Artificial Sequence
  n-mer motif encoding polynucleotide
tctaacagcagtgttgcggta

SEQ ID NO: 2908 - DNA, 21 bp, Artificial Sequence
  n-mer motif encoding polynucleotide
aatcatggtcgtgctattgat

SEQ ID NO: 2909 - DNA, 21 bp, Artificial Sequence
  n-mer motif encoding polynucleotide
gatacgtataatagtaatact

SEQ ID NO: 2910 - DNA, 21 bp, Artificial Sequence
  n-mer motif encoding polynucleotide
acattccaccaagcggtcaaa

SEQ ID NO: 2911 - DNA, 21 bp, Artificial Sequence
  n-mer motif encoding polynucleotide
tggcatactggtgtgtttcag

SEQ ID NO: 2912 - DNA, 21 bp, Artificial Sequence
  n-mer motif encoding polynucleotide
aggggtgatctttctacgcca

SEQ ID NO: 2913 - DNA, 21 bp, Artificial Sequence
  n-mer motif encoding polynucleotide
atgcttagtcaggttctgacg

SEQ ID NO: 2914 - DNA, 21 bp, Artificial Sequence
  n-mer motif encoding polynucleotide
gaaaacgaaaaacgagaaagc

SEQ ID NO: 2915 - DNA, 21 bp, Artificial Sequence
  n-mer motif encoding polynucleotide
atttcgagttatgatggtaat

SEQ ID NO: 2916 - DNA, 21 bp, Artificial Sequence
  n-mer motif encoding polynucleotide
actcgtggcgacatggaattc

SEQ ID NO: 2917 - DNA, 21 bp, Artificial Sequence
  n-mer motif encoding polynucleotide
aatgtgcagaatgtgcctggg

SEQ ID NO: 2918 - DNA, 21 bp, Artificial Sequence
  n-mer motif encoding polynucleotide
tctttcacgaacacaaaccca

SEQ ID NO: 2919 - DNA, 21 bp, Artificial Sequence
  n-mer motif encoding polynucleotide
tcgaacgctggctaccactcg

SEQ ID NO: 2920 - DNA, 21 bp, Artificial Sequence
  n-mer motif encoding polynucleotide
gactacaaaaacagcgcgcca

SEQ ID NO: 2921 - DNA, 21 bp, Artificial Sequence
  n-mer motif encoding polynucleotide
gtcgggaaaaactcgtacgaa

SEQ ID NO: 2922 - DNA, 21 bp, Artificial Sequence
  n-mer motif encoding polynucleotide
gcttacgcaggtgtacttggg

SEQ ID NO: 2923 - DNA, 21 bp, Artificial Sequence
  n-mer motif encoding polynucleotide
acgacgtctgagcgtgtgaat

SEQ ID NO: 2924 - DNA, 21 bp, Artificial Sequence
  n-mer motif encoding polynucleotide
gacaccggaatcaaaaacgtt

SEQ ID NO: 2925 - DNA, 21 bp, Artificial Sequence
  n-mer motif encoding polynucleotide
tcgaccagctctctggttccc

SEQ ID NO: 2926 - DNA, 21 bp, Artificial Sequence
  n-mer motif encoding polynucleotide
tggagcgccggcgaacgggtg

SEQ ID NO: 2927 - DNA, 21 bp, Artificial Sequence
  n-mer motif encoding polynucleotide
agttcggggagtttgattact

SEQ ID NO: 2928 - DNA, 21 bp, Artificial Sequence
  n-mer motif encoding polynucleotide
tggatttctactgagatgagg

SEQ ID NO: 2929 - DNA, 21 bp, Artificial Sequence
  n-mer motif encoding polynucleotide
tttgcggctggggcgcatggt

SEQ ID NO: 2930 - DNA, 21 bp, Artificial Sequence
  n-mer motif encoding polynucleotide
ataggcgaccgcgaccaacgt

SEQ ID NO: 2931 - DNA, 21 bp, Artificial Sequence
  n-mer motif encoding polynucleotide
agtacgattggtaattctact

SEQ ID NO: 2932 - DNA, 21 bp, Artificial Sequence
  n-mer motif encoding polynucleotide
ggaagtggcaccgtcggtcga

SEQ ID NO: 2933 - DNA, 21 bp, Artificial Sequence
  n-mer motif encoding polynucleotide
catgttacggcggtggttgat

SEQ ID NO: 2934 - DNA, 21 bp, Artificial Sequence
  n-mer motif encoding polynucleotide
gataaggcgggggtggctaat

SEQ ID NO: 2935 - DNA, 21 bp, Artificial Sequence
  n-mer motif encoding polynucleotide
cgtctgactgatactatgcat

SEQ ID NO: 2936 - DNA, 21 bp, Artificial Sequence
  n-mer motif encoding polynucleotide
ctgaacactctaatccacaaa

SEQ ID NO: 2937 - DNA, 21 bp, Artificial Sequence
  n-mer motif encoding polynucleotide
agttatcagaatcctccgcct

SEQ ID NO: 2938 - DNA, 21 bp, Artificial Sequence
  n-mer motif encoding polynucleotide
ttgacaggattaaacgctttc

SEQ ID NO: 2939 - DNA, 21 bp, Artificial Sequence
  n-mer motif encoding polynucleotide
agtcctgtgctttctccttcg

SEQ ID NO: 2940 - DNA, 21 bp, Artificial Sequence
  n-mer motif encoding polynucleotide
gttcaaacacacataggagtc

SEQ ID NO: 2941 - DNA, 21 bp, Artificial Sequence
  n-mer motif encoding polynucleotide
catatgtcttctgttgcgact

SEQ ID NO: 2942 - DNA, 21 bp, Artificial Sequence
  n-mer motif encoding polynucleotide
ggaaaagccaacgacggttct

SEQ ID NO: 2943 - DNA, 21 bp, Artificial Sequence
  n-mer motif encoding polynucleotide
agtactaacgacgaacgcaaa

SEQ ID NO: 2944 - DNA, 21 bp, Artificial Sequence
  n-mer motif encoding polynucleotide
cagggggggaatagtcggttt

SEQ ID NO: 2945 - DNA, 21 bp, Artificial Sequence
  n-mer motif encoding polynucleotide
cctaacaacgaaaaaaacccg

SEQ ID NO: 2946 - DNA, 21 bp, Artificial Sequence
  n-mer motif encoding polynucleotide
gtggctgcgacgggtggtact

SEQ ID NO: 2947 - DNA, 21 bp, Artificial Sequence
  n-mer motif encoding polynucleotide
gcgattgtggatagggggagt

SEQ ID NO: 2948 - DNA, 21 bp, Artificial Sequence
  n-mer motif encoding polynucleotide
tcccaacaccacacgccactg

SEQ ID NO: 2949 - DNA, 21 bp, Artificial Sequence
  n-mer motif encoding polynucleotide
ttacaaagctcgatgaacgta

SEQ ID NO: 2950 - DNA, 21 bp, Artificial Sequence
  n-mer motif encoding polynucleotide
cgagaaaccaacccgtctgaa

SEQ ID NO: 2951 - DNA, 21 bp, Artificial Sequence
  n-mer motif encoding polynucleotide
gggttcgggcacctgcccgaa

SEQ ID NO: 2952 - DNA, 21 bp, Artificial Sequence
  n-mer motif encoding polynucleotide
cggaatgctactgtgactgtt

SEQ ID NO: 2953 - DNA, 21 bp, Artificial Sequence
  n-mer motif encoding polynucleotide
gtttcaaacgcttcgggctta

SEQ ID NO: 2954 - DNA, 21 bp, Artificial Sequence
  n-mer motif encoding polynucleotide
gatcgtccgaataatgagtcg

SEQ ID NO: 2955 - DNA, 21 bp, Artificial Sequence
  n-mer motif encoding polynucleotide
caggttagtctggtgaagttg

SEQ ID NO: 2956 - DNA, 21 bp, Artificial Sequence
  n-mer motif encoding polynucleotide
agtaatatgcgtgaggagatt

SEQ ID NO: 2957 - DNA, 21 bp, Artificial Sequence
  n-mer motif encoding polynucleotide
gatattgggcgttcgaatagt

SEQ ID NO: 2958 - DNA, 21 bp, Artificial Sequence
  n-mer motif encoding polynucleotide
gatcatatgaatttgaggtct

SEQ ID NO: 2959 - DNA, 21 bp, Artificial Sequence
  n-mer motif encoding polynucleotide
attgagcgtagtagtgatcgt

SEQ ID NO: 2960 - DNA, 21 bp, Artificial Sequence
  n-mer motif encoding polynucleotide
ttgtctcagaattttaatcct

SEQ ID NO: 2961 - DNA, 21 bp, Artificial Sequence
  n-mer motif encoding polynucleotide
tattctatgggtcagcagccg

SEQ ID NO: 2962 - DNA, 21 bp, Artificial Sequence
  n-mer motif encoding polynucleotide
tacacacaagggataatgaac

SEQ ID NO: 2963 - DNA, 21 bp, Artificial Sequence
  n-mer motif encoding polynucleotide
atgctgtctcatggtgcgctt

SEQ ID NO: 2964 - DNA, 21 bp, Artificial Sequence
  n-mer motif encoding polynucleotide
gcttataatgctcgtctgcct

SEQ ID NO: 2965 - DNA, 21 bp, Artificial Sequence
  n-mer motif encoding polynucleotide
agacactactccgacaacgcc

SEQ ID NO: 2966 - DNA, 21 bp, Artificial Sequence
  n-mer motif encoding polynucleotide
gcacacacagccatgacctac

SEQ ID NO: 2967 - DNA, 21 bp, Artificial Sequence
  n-mer motif encoding polynucleotide
ctaacaggctctgacatgaaa

SEQ ID NO: 2968 - DNA, 21 bp, Artificial Sequence
  n-mer motif encoding polynucleotide
accttacacacgaaagacttg

SEQ ID NO: 2969 - DNA, 21 bp, Artificial Sequence
  n-mer motif encoding polynucleotide
tcgggtcaaaacggtacatca

SEQ ID NO: 2970 - DNA, 21 bp, Artificial Sequence
  n-mer motif encoding polynucleotide
cgtggggacgtccacaccaac

SEQ ID NO: 2971 - DNA, 21 bp, Artificial Sequence
  n-mer motif encoding polynucleotide
accggaacggctacactccca

SEQ ID NO: 2972 - DNA, 21 bp, Artificial Sequence
  n-mer motif encoding polynucleotide
ctgggtacgctgcttagtcag

SEQ ID NO: 2973 - DNA, 21 bp, Artificial Sequence
  n-mer motif encoding polynucleotide
gtcctctcctccaacctgtac

SEQ ID NO: 2974 - DNA, 21 bp, Artificial Sequence
  n-mer motif encoding polynucleotide
agtttggggtcggatcgtatg

SEQ ID NO: 2975 - DNA, 21 bp, Artificial Sequence
  n-mer motif encoding polynucleotide
aggggagatctttctacgcct

SEQ ID NO: 2976 - DNA, 21 bp, Artificial Sequence
  n-mer motif encoding polynucleotide
aggatgtcggagagttctgat

SEQ ID NO: 2977 - DNA, 21 bp, Artificial Sequence
  n-mer motif encoding polynucleotide
atgactgagaaggcttctatt

SEQ ID NO: 2978 - DNA, 21 bp, Artificial Sequence
  n-mer motif encoding polynucleotide
acagaacaatcttactaacga

SEQ ID NO: 2979 - DNA, 21 bp, Artificial Sequence
  n-mer motif encoding polynucleotide
gttgaatctaaatccgaacca

SEQ ID NO: 2980 - DNA, 21 bp, Artificial Sequence
  n-mer motif encoding polynucleotide
atgaatcttgtgagggattcg

SEQ ID NO: 2981 - DNA, 21 bp, Artificial Sequence
  n-mer motif encoding polynucleotide
caaaaccactctataacaaca

SEQ ID NO: 2982 - DNA, 21 bp, Artificial Sequence
  n-mer motif encoding polynucleotide
acgctggacaacaaccacagc

SEQ ID NO: 2983 - DNA, 21 bp, Artificial Sequence
  n-mer motif encoding polynucleotide
acgaagagttttaatgatctt

SEQ ID NO: 2984 - DNA, 21 bp, Artificial Sequence
  n-mer motif encoding polynucleotide
gccacagaacactcagggcgc

SEQ ID NO: 2985 - DNA, 21 bp, Artificial Sequence
  n-mer motif encoding polynucleotide
caagggactctcttgtctcca

SEQ ID NO: 2986 - DNA, 21 bp, Artificial Sequence
  n-mer motif encoding polynucleotide
acattccaccaaggggtcaaa

SEQ ID NO: 2987 - DNA, 21 bp, Artificial Sequence
  n-mer motif encoding polynucleotide
tgtcagcgggctgattgtgcg

SEQ ID NO: 2988 - DNA, 21 bp, Artificial Sequence
  n-mer motif encoding polynucleotide
cggtatgatggtactcttaat

SEQ ID NO: 2989 - DNA, 21 bp, Artificial Sequence
  n-mer motif encoding polynucleotide
caaggcggtacaaacaacccc

SEQ ID NO: 2990 - DNA, 21 bp, Artificial Sequence
  n-mer motif encoding polynucleotide
gggggtaactaccacaccact

SEQ ID NO: 2991 - DNA, 21 bp, Artificial Sequence
  n-mer motif encoding polynucleotide
ctggttgttcagagtgcgcag

SEQ ID NO: 2992 - DNA, 21 bp, Artificial Sequence
  n-mer motif encoding polynucleotide
tatcctcatgagagtaagaat

SEQ ID NO: 2993 - DNA, 21 bp, Artificial Sequence
  n-mer motif encoding polynucleotide
gagattgttaggcatacgcat

SEQ ID NO: 2994 - DNA, 21 bp, Artificial Sequence
  n-mer motif encoding polynucleotide
gaccggacaaacaacatgagc

SEQ ID NO: 2995 - DNA, 21 bp, Artificial Sequence
  n-mer motif encoding polynucleotide
tccgtaaccaacggagcggaa

SEQ ID NO: 2996 - DNA, 21 bp, Artificial Sequence
  n-mer motif encoding polynucleotide
agcggacaaaaaaactcagaa

SEQ ID NO: 2997 - DNA, 21 bp, Artificial Sequence
  n-mer motif encoding polynucleotide
gagcagaagaagactgatcat

SEQ ID NO: 2998 - DNA, 21 bp, Artificial Sequence
  n-mer motif encoding polynucleotide
aatattaatggtggggggaat

SEQ ID NO: 2999 - DNA, 21 bp, Artificial Sequence
  n-mer motif encoding polynucleotide
aagctgcatactaaggatctt

SEQ ID NO: 3000 - DNA, 21 bp, Artificial Sequence
  n-mer motif encoding polynucleotide
agcttcttggtagcccaccca

SEQ ID NO: 3001 - DNA, 21 bp, Artificial Sequence
  n-mer motif encoding polynucleotide
taccaacaaaacatagaaatc

SEQ ID NO: 3002 - DNA, 21 bp, Artificial Sequence
  n-mer motif encoding polynucleotide
aggggtgatctttctacgact

SEQ ID NO: 3003 - DNA, 21 bp, Artificial Sequence
  n-mer motif encoding polynucleotide
gcgaacctcaacttgaccagt

SEQ ID NO: 3004 - DNA, 21 bp, Artificial Sequence
  n-mer motif encoding polynucleotide
acggtgcagcatgcggcgacg

SEQ ID NO: 3005 - DNA, 21 bp, Artificial Sequence
  n-mer motif encoding polynucleotide
accgtaaacctcctagcggca

SEQ ID NO: 3006 - DNA, 21 bp, Artificial Sequence
  n-mer motif encoding polynucleotide
aaccaaagagttgaacaaaaa

SEQ ID NO: 3007 - DNA, 21 bp, Artificial Sequence
  n-mer motif encoding polynucleotide
aatacttatactgctgcgaag

SEQ ID NO: 3008 - DNA, 21 bp, Artificial Sequence
  n-mer motif encoding polynucleotide
atccaaagagacgtgggccac

SEQ ID NO: 3009 - DNA, 21 bp, Artificial Sequence
  n-mer motif encoding polynucleotide
atctcagaaatgactaggtac

SEQ ID NO: 3010 - DNA, 21 bp, Artificial Sequence
  n-mer motif encoding polynucleotide
attgctactaatgtgatttat

SEQ ID NO: 3011 - DNA, 21 bp, Artificial Sequence
  n-mer motif encoding polynucleotide
aacggcaaccactccatagac

SEQ ID NO: 3012 - DNA, 21 bp, Artificial Sequence
  n-mer motif encoding polynucleotide
acgagtattggtagtgctaag

SEQ ID NO: 3013 - DNA, 21 bp, Artificial Sequence
  n-mer motif encoding polynucleotide
aacgtacactctgttgacaaa

SEQ ID NO: 3014 - DNA, 21 bp, Artificial Sequence
  n-mer motif encoding polynucleotide
gaactctccgttccgaaacca

SEQ ID NO: 3015 - DNA, 21 bp, Artificial Sequence
  n-mer motif encoding polynucleotide
ttcctcgacaaatacaactac

SEQ ID NO: 3016 - DNA, 21 bp, Artificial Sequence
  n-mer motif encoding polynucleotide
tacatcccgaacaactcagga

SEQ ID NO: 3017 - DNA, 21 bp, Artificial Sequence
  n-mer motif encoding polynucleotide
gggctaggacaaccccaactc

SEQ ID NO: 3018 - DNA, 21 bp, Artificial Sequence
  n-mer motif encoding polynucleotide
gaggggagtcaggggaatcat

SEQ ID NO: 3019 - DNA, 21 bp, Artificial Sequence
  n-mer motif encoding polynucleotide
aatatttatatggcgagtggt

SEQ ID NO: 3020 - DNA, 21 bp, Artificial Sequence
  n-mer motif encoding polynucleotide
aatttgcagactggtgttcag

SEQ ID NO: 3021 - DNA, 21 bp, Artificial Sequence
  n-mer motif encoding polynucleotide
accgtcgctccctacagtagc

SEQ ID NO: 3022 - DNA, 21 bp, Artificial Sequence
  n-mer motif encoding polynucleotide
tcaaactactctgacggaata

SEQ ID NO: 3023 - DNA, 21 bp, Artificial Sequence
  n-mer motif encoding polynucleotide
gctacttacgttgtcggaaca

SEQ ID NO: 3024 - DNA, 21 bp, Artificial Sequence
  n-mer motif encoding polynucleotide
tcaagggaagcgggttcaact

SEQ ID NO: 3025 - DNA, 21 bp, Artificial Sequence
  n-mer motif encoding polynucleotide
gccggaaaaacccacgccgac

SEQ ID NO: 3026 - DNA, 21 bp, Artificial Sequence
  n-mer motif encoding polynucleotide
ccgctttctcttcataatagt

SEQ ID NO: 3027 - DNA, 21 bp, Artificial Sequence
  n-mer motif encoding polynucleotide
cttcgagacctaaacggagga

SEQ ID NO: 3028 - DNA, 21 bp, Artificial Sequence
  n-mer motif encoding polynucleotide
gataggacgtattcgaatacg

SEQ ID NO: 3029 - DNA, 21 bp, Artificial Sequence
  n-mer motif encoding polynucleotide
tcggtcaccagtggaacacaa

SEQ ID NO: 3030 - DNA, 21 bp, Artificial Sequence
  n-mer motif encoding polynucleotide
aatatgacttcggcttatcat

SEQ ID NO: 3031 - DNA, 21 bp, Artificial Sequence
  n-mer motif encoding polynucleotide
gttatgggtggtcctgggatt

SEQ ID NO: 3032 - DNA, 21 bp, Artificial Sequence
  n-mer motif encoding polynucleotide
gctgggactcatactgataag

SEQ ID NO: 3033 - DNA, 21 bp, Artificial Sequence
  n-mer motif encoding polynucleotide
ggtactatgaatattggtatt

SEQ ID NO: 3034 - DNA, 21 bp, Artificial Sequence
  n-mer motif encoding polynucleotide
acagccggcggcgaacgcgcc

SEQ ID NO: 3035 - DNA, 21 bp, Artificial Sequence
  n-mer motif encoding polynucleotide
ggtatgacttctaatcaggtt

SEQ ID NO: 3036 - DNA, 21 bp, Artificial Sequence
  n-mer motif encoding polynucleotide
catttttcgcagattactaat

SEQ ID NO: 3037 - DNA, 21 bp, Artificial Sequence
  n-mer motif encoding polynucleotide
agcaggatagaaaacaacaac

SEQ ID NO: 3038 - DNA, 21 bp, Artificial Sequence
  n-mer motif encoding polynucleotide
gatacggcgagttataataat

SEQ ID NO: 3039 - DNA, 21 bp, Artificial Sequence
  n-mer motif encoding polynucleotide
gtgaatcagagtcctggggct

SEQ ID NO: 3040 - DNA, 21 bp, Artificial Sequence
  n-mer motif encoding polynucleotide
aataatatgggtcatggtcat

SEQ ID NO: 3041 - DNA, 21 bp, Artificial Sequence
  n-mer motif encoding polynucleotide
tcgcggctatcacaagacccc

SEQ ID NO: 3042 - DNA, 21 bp, Artificial Sequence
  n-mer motif encoding polynucleotide
tctacgtctcaggctgtgcag

SEQ ID NO: 3043 - DNA, 21 bp, Artificial Sequence
  n-mer motif encoding polynucleotide
cgatggcaaggactgagcgcg

SEQ ID NO: 3044 - DNA, 21 bp, Artificial Sequence
  n-mer motif encoding polynucleotide
gcgcatatgcattcggagttg

SEQ ID NO: 3045 - DNA, 21 bp, Artificial Sequence
  n-mer motif encoding polynucleotide
aataatcttacgaattcgacg

SEQ ID NO: 3046 - DNA, 21 bp, Artificial Sequence
  n-mer motif encoding polynucleotide
cagcctagtgcgagtgagctt

SEQ ID NO: 3047 - DNA, 21 bp, Artificial Sequence
  n-mer motif encoding polynucleotide
gggacttccttggaaaaccga

SEQ ID NO: 3048 - DNA, 21 bp, Artificial Sequence
  n-mer motif encoding polynucleotide
ctgtctaattcgattacgcct

SEQ ID NO: 3049 - DNA, 21 bp, Artificial Sequence
  n-mer motif encoding polynucleotide
accatagtgtccacttcttac

SEQ ID NO: 3050 - DNA, 21 bp, Artificial Sequence
  n-mer motif encoding polynucleotide
accctaggctacccagacaaa

SEQ ID NO: 3051 - DNA, 21 bp, Artificial Sequence
  n-mer motif encoding polynucleotide
tcaagacacgacgtccgaaac

SEQ ID NO: 3052 - DNA, 21 bp, Artificial Sequence
  n-mer motif encoding polynucleotide
aatggtagtgtggctaatcct

SEQ ID NO: 3053 - DNA, 21 bp, Artificial Sequence
  n-mer motif encoding polynucleotide
gcgatggatgggtatagggtt

SEQ ID NO: 3054 - DNA, 21 bp, Artificial Sequence
  n-mer motif encoding polynucleotide
tggacgggcgcacaaccttct

SEQ ID NO: 3055 - DNA, 21 bp, Artificial Sequence
  n-mer motif encoding polynucleotide
aaaaacggcgccataggaaca

SEQ ID NO: 3056 - DNA, 21 bp, Artificial Sequence
  n-mer motif encoding polynucleotide
gtacttccaagtcggatcgcg

SEQ ID NO: 3057 - DNA, 21 bp, Artificial Sequence
  n-mer motif encoding polynucleotide
gataatgtgaattctcagcct

SEQ ID NO: 3058 - DNA, 21 bp, Artificial Sequence
  n-mer motif encoding polynucleotide
ggcgtaaacgctagctacagc

SEQ ID NO: 3059 - DNA, 21 bp, Artificial Sequence
  n-mer motif encoding polynucleotide
ctgtctcacgccatggaccgg

SEQ ID NO: 3060 - DNA, 21 bp, Artificial Sequence
  n-mer motif encoding polynucleotide
agggctcatggggataatcag

SEQ ID NO: 3061 - DNA, 21 bp, Artificial Sequence
  n-mer motif encoding polynucleotide
ttgcagacgcctgggacgacg

SEQ ID NO: 3062 - DNA, 21 bp, Artificial Sequence
  n-mer motif encoding polynucleotide
actcaggttgttagtatttat

SEQ ID NO: 3063 - DNA, 21 bp, Artificial Sequence
  n-mer motif encoding polynucleotide
caggttcaggggactctgggg

SEQ ID NO: 3064 - DNA, 21 bp, Artificial Sequence
  n-mer motif encoding polynucleotide
gtgggcaaccaaaacttaccc

SEQ ID NO: 3065 - DNA, 21 bp, Artificial Sequence
  n-mer motif encoding polynucleotide
tatgttgattatagtaagtcg

SEQ ID NO: 3066 - DNA, 21 bp, Artificial Sequence
  n-mer motif encoding polynucleotide
ctgcttaattcttcgggtgtg

SEQ ID NO: 3067 - DNA, 21 bp, Artificial Sequence
  n-mer motif encoding polynucleotide
aatcagtcgcttactatggat

SEQ ID NO: 3068 - DNA, 21 bp, Artificial Sequence
  n-mer motif encoding polynucleotide
gctggtaaggatcttagtaat

SEQ ID NO: 3069 - DNA, 21 bp, Artificial Sequence
  n-mer motif encoding polynucleotide
tcttacgttagcgtccccgcc

SEQ ID NO: 3070 - DNA, 21 bp, Artificial Sequence
  n-mer motif encoding polynucleotide
aatgaggggcgtgtgcagact

SEQ ID NO: 3071 - DNA, 21 bp, Artificial Sequence
  n-mer motif encoding polynucleotide
actttgacgcagactgggatg

SEQ ID NO: 3072 - DNA, 21 bp, Artificial Sequence
  n-mer motif encoding polynucleotide
ggcttcgcattaactggcacc

SEQ ID NO: 3073 - DNA, 21 bp, Artificial Sequence
  n-mer motif encoding polynucleotide
cagtcgacgctgaataggcct

SEQ ID NO: 3074 - DNA, 21 bp, Artificial Sequence
  n-mer motif encoding polynucleotide
acaacaacacactccatctcc

SEQ ID NO: 3075 - DNA, 21 bp, Artificial Sequence
  n-mer motif encoding polynucleotide
aacacacacagacaagaatac

SEQ ID NO: 3076 - DNA, 21 bp, Artificial Sequence
  n-mer motif encoding polynucleotide
tcccaaatagtcaacaccaca

SEQ ID NO: 3077 - DNA, 21 bp, Artificial Sequence
  n-mer motif encoding polynucleotide
ctggtgcttgagatgcagacg

SEQ ID NO: 3078 - DNA, 21 bp, Artificial Sequence
  n-mer motif encoding polynucleotide
aacgacatctccacccaacgg

SEQ ID NO: 3079 - DNA, 21 bp, Artificial Sequence
  n-mer motif encoding polynucleotide
tacaccgccgacaaaaaacaa

SEQ ID NO: 3080 - DNA, 21 bp, Artificial Sequence
  n-mer motif encoding polynucleotide
ttcggagcaaccaccacagca

SEQ ID NO: 3081 - DNA, 21 bp, Artificial Sequence
  n-mer motif encoding polynucleotide
gttcagatttctatgaataat

SEQ ID NO: 3082 - DNA, 21 bp, Artificial Sequence
  n-mer motif encoding polynucleotide
atgcatgcgcaggagtctcgt

SEQ ID NO: 3083 - DNA, 21 bp, Artificial Sequence
  n-mer motif encoding polynucleotide
catgtgaatactgctgatcgg

SEQ ID NO: 3084 - DNA, 21 bp, Artificial Sequence
  n-mer motif encoding polynucleotide
tacagtacagactccaccaaa

SEQ ID NO: 3085 - DNA, 21 bp, Artificial Sequence
  n-mer motif encoding polynucleotide
ggacacgaccgaacaccaaac

SEQ ID NO: 3086 - DNA, 21 bp, Artificial Sequence
  n-mer motif encoding polynucleotide
acgagtggtgtgcttacgcgg

SEQ ID NO: 3087 - DNA, 21 bp, Artificial Sequence
  n-mer motif encoding polynucleotide
aatattgctatgtctaagatt

SEQ ID NO: 3088 - DNA, 21 bp, Artificial Sequence
  n-mer motif encoding polynucleotide
atggggactgagtatcgtatg

SEQ ID NO: 3089 - DNA, 21 bp, Artificial Sequence
  n-mer motif encoding polynucleotide
ccttatgcgaataggcttgag

SEQ ID NO: 3090 - DNA, 21 bp, Artificial Sequence
  n-mer motif encoding polynucleotide
ccgcttcagaataataagacg

SEQ ID NO: 3091 - DNA, 21 bp, Artificial Sequence
  n-mer motif encoding polynucleotide
tccttgacggaaaaagcgccg

SEQ ID NO: 3092 - DNA, 21 bp, Artificial Sequence
  n-mer motif encoding polynucleotide
aatatggtgtatacgaatgtg

SEQ ID NO: 3093 - DNA, 21 bp, Artificial Sequence
  n-mer motif encoding polynucleotide
atgttaagtgccacccaaggg

SEQ ID NO: 3094 - DNA, 21 bp, Artificial Sequence
  n-mer motif encoding polynucleotide
aacatgactcactcaaccgta

SEQ ID NO: 3095 - DNA, 21 bp, Artificial Sequence
  n-mer motif encoding polynucleotide
atttatacgaatagtcatgtt

SEQ ID NO: 3096 - DNA, 21 bp, Artificial Sequence
  n-mer motif encoding polynucleotide
tggtcgcatgatcggcctact

SEQ ID NO: 3097 - DNA, 21 bp, Artificial Sequence
  n-mer motif encoding polynucleotide
gaaaaaggcacaccaagtagc

SEQ ID NO: 3098 - DNA, 21 bp, Artificial Sequence
  n-mer motif encoding polynucleotide
catcattctactgagtcgttg

SEQ ID NO: 3099 - DNA, 21 bp, Artificial Sequence
  n-mer motif encoding polynucleotide
ccaaaaagcacccaagtaatg

SEQ ID NO: 3100 - DNA, 21 bp, Artificial Sequence
  n-mer motif encoding polynucleotide
agtgataggactgctcagcag

SEQ ID NO: 3101 - DNA, 21 bp, Artificial Sequence
  n-mer motif encoding polynucleotide
gctaccctcgcacggacctca

SEQ ID NO: 3102 - DNA, 21 bp, Artificial Sequence
  n-mer motif encoding polynucleotide
atttctcaggtgtcttttaat

SEQ ID NO: 3103 - DNA, 21 bp, Artificial Sequence
  n-mer motif encoding polynucleotide
cattatgggaataaggatatt

SEQ ID NO: 3104 - DNA, 21 bp, Artificial Sequence
  n-mer motif encoding polynucleotide
aatgatgggactgatcgtagg

SEQ ID NO: 3105 - DNA, 21 bp, Artificial Sequence
  n-mer motif encoding polynucleotide
accaaccacataaccggtcca

SEQ ID NO: 3106 - DNA, 21 bp, Artificial Sequence
  n-mer motif encoding polynucleotide
actaattctaatcagagttcg

SEQ ID NO: 3107 - DNA, 21 bp, Artificial Sequence
  n-mer motif encoding polynucleotide
gtggcgactcattataatgag

SEQ ID NO: 3108 - DNA, 21 bp, Artificial Sequence
  n-mer motif encoding polynucleotide
gacctcggtacggctagaacc

SEQ ID NO: 3109 - DNA, 21 bp, Artificial Sequence
  n-mer motif encoding polynucleotide
gctcttagtcagagtgcgggt

SEQ ID NO: 3110 - DNA, 21 bp, Artificial Sequence
  n-mer motif encoding polynucleotide
aaaaccaccctacaccaagca

SEQ ID NO: 3111 - DNA, 21 bp, Artificial Sequence
  n-mer motif encoding polynucleotide
atgataaacgccataactcca

SEQ ID NO: 3112 - DNA, 21 bp, Artificial Sequence
  n-mer motif encoding polynucleotide
gggtctacgccgggggcgagt

SEQ ID NO: 3113 - DNA, 21 bp, Artificial Sequence
  n-mer motif encoding polynucleotide
aatgagaagccgcagtcgacg

SEQ ID NO: 3114 - DNA, 21 bp, Artificial Sequence
  n-mer motif encoding polynucleotide
tcattgatgggcagtgcagga

SEQ ID NO: 3115 - DNA, 21 bp, Artificial Sequence
  n-mer motif encoding polynucleotide
accgacacgctcagcgaaaga

SEQ ID NO: 3116 - DNA, 21 bp, Artificial Sequence
  n-mer motif encoding polynucleotide
gcctcgcaatcagaaaaaaac

SEQ ID NO: 3117 - DNA, 21 bp, Artificial Sequence
  n-mer motif encoding polynucleotide
gctgttagaacaccggcaatg

SEQ ID NO: 3118 - DNA, 21 bp, Artificial Sequence
  n-mer motif encoding polynucleotide
cctaatgctagttttggtccg

SEQ ID NO: 3119 - DNA, 21 bp, Artificial Sequence
  n-mer motif encoding polynucleotide
aaagcccacgttgtagaaata

SEQ ID NO: 3120 - DNA, 21 bp, Artificial Sequence
  n-mer motif encoding polynucleotide
tatatttcggcgcctccgatg

SEQ ID NO: 3121 - DNA, 21 bp, Artificial Sequence
  n-mer motif encoding polynucleotide
ccaatccaaaacgaatcgtcc

SEQ ID NO: 3122 - DNA, 21 bp, Artificial Sequence
  n-mer motif encoding polynucleotide
ggcgtaaccaacgcttccaaa

SEQ ID NO: 3123 - DNA, 21 bp, Artificial Sequence
  n-mer motif encoding polynucleotide
gtaaacgggggaaaaccagtc

SEQ ID NO: 3124 - DNA, 21 bp, Artificial Sequence
  n-mer motif encoding polynucleotide
agtgttctgagtagttcgact

SEQ ID NO: 3125 - DNA, 21 bp, Artificial Sequence
  n-mer motif encoding polynucleotide
ttagcacaaggcacggaccgg

SEQ ID NO: 3126 - DNA, 21 bp, Artificial Sequence
  n-mer motif encoding polynucleotide
cagtctgtgtcgactggggcg

SEQ ID NO: 3127 - DNA, 21 bp, Artificial Sequence
  n-mer motif encoding polynucleotide
ttgacgcaggtttatcatgag

SEQ ID NO: 3128 - DNA, 21 bp, Artificial Sequence
  n-mer motif encoding polynucleotide
agagaaatgagcagcctatct

SEQ ID NO: 3129 - DNA, 21 bp, Artificial Sequence
  n-mer motif encoding polynucleotide
acgagtacgatgactgcgcgt

SEQ ID NO: 3130 - DNA, 21 bp, Artificial Sequence
  n-mer motif encoding polynucleotide
actattcagcaggttagtaat

SEQ ID NO: 3131 - DNA, 21 bp, Artificial Sequence
  n-mer motif encoding polynucleotide
aggacgcaagcaggggactca

SEQ ID NO: 3132 - DNA, 21 bp, Artificial Sequence
  n-mer motif encoding polynucleotide
aatacttatactgctgggaag

SEQ ID NO: 3133 - DNA, 21 bp, Artificial Sequence
  n-mer motif encoding polynucleotide
aatgagcagaatacgccgagt

SEQ ID NO: 3134 - DNA, 21 bp, Artificial Sequence
  n-mer motif encoding polynucleotide
ggattcgcccaacaagaagcg

SEQ ID NO: 3135 - DNA, 21 bp, Artificial Sequence
  n-mer motif encoding polynucleotide
agtccgcagcatggtgttatt

SEQ ID NO: 3136 - DNA, 21 bp, Artificial Sequence
  n-mer motif encoding polynucleotide
gcagtccacgcaacatcatca

SEQ ID NO: 3137 - DNA, 21 bp, Artificial Sequence
  n-mer motif encoding polynucleotide
ggagacacccgtggtgcacac

SEQ ID NO: 3138 - DNA, 21 bp, Artificial Sequence
  n-mer motif encoding polynucleotide
gtaagagaaaccacacacctc

SEQ ID NO: 3139 - DNA, 21 bp, Artificial Sequence
  n-mer motif encoding polynucleotide
ctttctcaacaacgcgactac

SEQ ID NO: 3140 - DNA, 21 bp, Artificial Sequence
  n-mer motif encoding polynucleotide
gcgactaggggtgagtcgtct

SEQ ID NO: 3141 - DNA, 21 bp, Artificial Sequence
  n-mer motif encoding polynucleotide
actaatgattctgtgggtagt

SEQ ID NO: 3142 - DNA, 21 bp, Artificial Sequence
  n-mer motif encoding polynucleotide
cttactaataattttaaggat

SEQ ID NO: 3143 - DNA, 21 bp, Artificial Sequence
  n-mer motif encoding polynucleotide
gtgaatgggactcagattttt

SEQ ID NO: 3144 - DNA, 21 bp, Artificial Sequence
  n-mer motif encoding polynucleotide
ggtaatactgggagtccgggg

SEQ ID NO: 3145 - DNA, 21 bp, Artificial Sequence
  n-mer motif encoding polynucleotide
tggacagctaaccaaggctta

SEQ ID NO: 3146 - DNA, 21 bp, Artificial Sequence
  n-mer motif encoding polynucleotide
aatactactccgacgaatcat

SEQ ID NO: 3147 - DNA, 21 bp, Artificial Sequence
  n-mer motif encoding polynucleotide
gaacgagtcaacgggatggca

SEQ ID NO: 3148 - DNA, 21 bp, Artificial Sequence
  n-mer motif encoding polynucleotide
aaagtcacaaacaacgcatac

SEQ ID NO: 3149 - DNA, 21 bp, Artificial Sequence
  n-mer motif encoding polynucleotide
ttatcctccgaatcacccagg

SEQ ID NO: 3150 - DNA, 21 bp, Artificial Sequence
  n-mer motif encoding polynucleotide
catacggcggcggttgctact

SEQ ID NO: 3151 - DNA, 21 bp, Artificial Sequence
  n-mer motif encoding polynucleotide
tacgacagccgactctacgcg

SEQ ID NO: 3152 - DNA, 21 bp, Artificial Sequence
  n-mer motif encoding polynucleotide
atagaacacatgcttagaccc

SEQ ID NO: 3153 - DNA, 21 bp, Artificial Sequence
  n-mer motif encoding polynucleotide
tacctagaatccaactacacc

SEQ ID NO: 3154 - DNA, 21 bp, Artificial Sequence
  n-mer motif encoding polynucleotide
gcgtactcatctaccgggcac

SEQ ID NO: 3155 - DNA, 21 bp, Artificial Sequence
  n-mer motif encoding polynucleotide
atcgacatatcgacgcaaagc

SEQ ID NO: 3156 - DNA, 21 bp, Artificial Sequence
  n-mer motif encoding polynucleotide
acaacaaactcaggcgcgacg

SEQ ID NO: 3157 - DNA, 21 bp, Artificial Sequence
  n-mer motif encoding polynucleotide
aacgtgctaaccacggttgtc

SEQ ID NO: 3158 - DNA, 21 bp, Artificial Sequence
  n-mer motif encoding polynucleotide
acaaccggaatcgaacgttcc

SEQ ID NO: 3159 - DNA, 21 bp, Artificial Sequence
  n-mer motif encoding polynucleotide
gcacgagtggacaccaaccaa

SEQ ID NO: 3160 - DNA, 21 bp, Artificial Sequence
  n-mer motif encoding polynucleotide
cagagtgtgaaggaggcgatt

SEQ ID NO: 3161 - DNA, 21 bp, Artificial Sequence
  n-mer motif encoding polynucleotide
gcgttgcttagtgtgaatgag

SEQ ID NO: 3162 - DNA, 21 bp, Artificial Sequence
  n-mer motif encoding polynucleotide
gggcgtgataatcatcatgcg

SEQ ID NO: 3163 - DNA, 21 bp, Artificial Sequence
  n-mer motif encoding polynucleotide
attcagtcgcagtcgcagttg

SEQ ID NO: 3164 - DNA, 21 bp, Artificial Sequence
  n-mer motif encoding polynucleotide
agtgagggtagttcgcggtcg

SEQ ID NO: 3165 - DNA, 21 bp, Artificial Sequence
  n-mer motif encoding polynucleotide
gacgtccaaaacatacgcgaa

SEQ ID NO: 3166 - DNA, 21 bp, Artificial Sequence
  n-mer motif encoding polynucleotide
aaaggccacgcctacgaagcc

SEQ ID NO: 3167 - DNA, 21 bp, Artificial Sequence
  n-mer motif encoding polynucleotide
tatgttagggcgcaggatcag

SEQ ID NO: 3168 - DNA, 21 bp, Artificial Sequence
  n-mer motif encoding polynucleotide
gtcgacgaataccgaagccgc

SEQ ID NO: 3169 - DNA, 21 bp, Artificial Sequence
  n-mer motif encoding polynucleotide
actctctcaggctacatgaga

SEQ ID NO: 3170 - DNA, 21 bp, Artificial Sequence
  n-mer motif encoding polynucleotide
cctagtgtccgtttgccctta

SEQ ID NO: 3171 - DNA, 21 bp, Artificial Sequence
  n-mer motif encoding polynucleotide
aacatagcaggcggagaacaa

SEQ ID NO: 3172 - DNA, 21 bp, Artificial Sequence
  n-mer motif encoding polynucleotide
ctgctccaatcgacctacttg

SEQ ID NO: 3173 - DNA, 21 bp, Artificial Sequence
  n-mer motif encoding polynucleotide
cagtcggatacgacttcgatt

SEQ ID NO: 3174 - DNA, 21 bp, Artificial Sequence
  n-mer motif encoding polynucleotide
attaggtctgggaatgcgatg

SEQ ID NO: 3175 - DNA, 21 bp, Artificial Sequence
  n-mer motif encoding polynucleotide
atgctgtctcaagtcttaaca

SEQ ID NO: 3176 - DNA, 21 bp, Artificial Sequence
  n-mer motif encoding polynucleotide
acagaacgccaaatcgaatta

SEQ ID NO: 3177 - DNA, 21 bp, Artificial Sequence
  n-mer motif encoding polynucleotide
ggaacccacgcctcagcatac

SEQ ID NO: 3178 - DNA, 21 bp, Artificial Sequence
  n-mer motif encoding polynucleotide
gttgagtcttcttattctcgg

SEQ ID NO: 3179 - DNA, 21 bp, Artificial Sequence
  n-mer motif encoding polynucleotide
ggtgggaattatcatactaag

SEQ ID NO: 3180 - DNA, 21 bp, Artificial Sequence
  n-mer motif encoding polynucleotide
cccaccagtcaccaagaaccc

SEQ ID NO: 3181 - DNA, 21 bp, Artificial Sequence
  n-mer motif encoding polynucleotide
accataatcggtgtcttaccc

SEQ ID NO: 3182 - DNA, 21 bp, Artificial Sequence
  n-mer motif encoding polynucleotide
tctaacagcggttctaccctc

SEQ ID NO: 3183 - DNA, 21 bp, Artificial Sequence
  n-mer motif encoding polynucleotide
tcgataacgaccgtagcgaac

SEQ ID NO: 3184 - DNA, 21 bp, Artificial Sequence
  n-mer motif encoding polynucleotide
gcgtctccggcgcagaccggc

SEQ ID NO: 3185 - DNA, 21 bp, Artificial Sequence
  n-mer motif encoding polynucleotide
tcgttgccgagtcatagtaat

SEQ ID NO: 3186 - DNA, 21 bp, Artificial Sequence
  n-mer motif encoding polynucleotide
ctacacaacgccgtcggaccc

SEQ ID NO: 3187 - DNA, 21 bp, Artificial Sequence
  n-mer motif encoding polynucleotide
caagccccgccaacagcacaa

SEQ ID NO: 3188 - DNA, 21 bp, Artificial Sequence
  n-mer motif encoding polynucleotide
cctaatactgctagtaatttt

SEQ ID NO: 3189 - DNA, 21 bp, Artificial Sequence
  n-mer motif encoding polynucleotide
ccctccaacagtgaaagattc

SEQ ID NO: 3190 - DNA, 21 bp, Artificial Sequence
  n-mer motif encoding polynucleotide
gaactccacgcacaacaacca

SEQ ID NO: 3191 - DNA, 21 bp, Artificial Sequence
  n-mer motif encoding polynucleotide
ggttcttattctgatggtagt

SEQ ID NO: 3192 - DNA, 21 bp, Artificial Sequence
  n-mer motif encoding polynucleotide
tatggtgtgcaggcgaatagt

SEQ ID NO: 3193 - DNA, 21 bp, Artificial Sequence
  n-mer motif encoding polynucleotide
gaagtaggtaaaaccacccac

SEQ ID NO: 3194 - DNA, 21 bp, Artificial Sequence
  n-mer motif encoding polynucleotide
acttcgcagggtaggagtcct

SEQ ID NO: 3195 - DNA, 21 bp, Artificial Sequence
  n-mer motif encoding polynucleotide
gtagaacacgtagcccaccaa

SEQ ID NO: 3196 - DNA, 21 bp, Artificial Sequence
  n-mer motif encoding polynucleotide
atccaaagcagctacaaccgc

SEQ ID NO: 3197 - DNA, 21 bp, Artificial Sequence
  n-mer motif encoding polynucleotide
acgctatcggttaccctgggt

SEQ ID NO: 3198 - DNA, 21 bp, Artificial Sequence
  n-mer motif encoding polynucleotide
cggaatgagccggttagtact

SEQ ID NO: 3199 - DNA, 21 bp, Artificial Sequence
  n-mer motif encoding polynucleotide
gtgattgtggggagtaatgag

SEQ ID NO: 3200 - DNA, 21 bp, Artificial Sequence
  n-mer motif encoding polynucleotide
gagctgtctactcctatggtt

SEQ ID NO: 3201 - DNA, 21 bp, Artificial Sequence
  n-mer motif encoding polynucleotide
gcttacaacgacctacgatca

SEQ ID NO: 3202 - DNA, 21 bp, Artificial Sequence
  n-mer motif encoding polynucleotide
aacgcgaactccggtgaacga

SEQ ID NO: 3203 - DNA, 21 bp, Artificial Sequence
  n-mer motif encoding polynucleotide
ttgtcatcacaatggacacaa

SEQ ID NO: 3204 - DNA, 21 bp, Artificial Sequence
  n-mer motif encoding polynucleotide
atcaacgccggcaactaccga

SEQ ID NO: 3205 - DNA, 21 bp, Artificial Sequence
  n-mer motif encoding polynucleotide
ctgaggtcgagtgaggctccg

SEQ ID NO: 3206 - DNA, 21 bp, Artificial Sequence
  n-mer motif encoding polynucleotide
acgtctgatacgaatgctagg

SEQ ID NO: 3207 - DNA, 21 bp, Artificial Sequence
  n-mer motif encoding polynucleotide
ccgaattctccgcatggttct

SEQ ID NO: 3208 - DNA, 21 bp, Artificial Sequence
  n-mer motif encoding polynucleotide
acccaacacctaccatccaca

SEQ ID NO: 3209 - DNA, 21 bp, Artificial Sequence
  n-mer motif encoding polynucleotide
gtgcatgggaatgctccggct

SEQ ID NO: 3210 - DNA, 21 bp, Artificial Sequence
  n-mer motif encoding polynucleotide
tcttctcagcgtgattctgtt

SEQ ID NO: 3211 - DNA, 21 bp, Artificial Sequence
  n-mer motif encoding polynucleotide
cccccctcagttgaccgaaaa

SEQ ID NO: 3212 - DNA, 21 bp, Artificial Sequence
  n-mer motif encoding polynucleotide
gagactctgccgtataagagt

SEQ ID NO: 3213 - DNA, 21 bp, Artificial Sequence
  n-mer motif encoding polynucleotide
catcttagtcaggctaatcat

SEQ ID NO: 3214 - DNA, 21 bp, Artificial Sequence
  n-mer motif encoding polynucleotide
aaaccgctaaacggtaccaac

SEQ ID NO: 3215 - DNA, 21 bp, Artificial Sequence
  n-mer motif encoding polynucleotide
tggcaaaccaacggcatgcaa

SEQ ID NO: 3216 - DNA, 21 bp, Artificial Sequence
  n-mer motif encoding polynucleotide
accgtgaacgtccactccgac

SEQ ID NO: 3217 - DNA, 21 bp, Artificial Sequence
  n-mer motif encoding polynucleotide
acccaatacgtcgttgcccct

SEQ ID NO: 3218 - DNA, 21 bp, Artificial Sequence
  n-mer motif encoding polynucleotide
aacgtcgactcctctaacgtg

SEQ ID NO: 3219 - DNA, 21 bp, Artificial Sequence
  n-mer motif encoding polynucleotide
aacggataccaactacaaatc

SEQ ID NO: 3220 - DNA, 21 bp, Artificial Sequence
  n-mer motif encoding polynucleotide
gaagaaacacggaccagaatg

SEQ ID NO: 3221 - DNA, 21 bp, Artificial Sequence
  n-mer motif encoding polynucleotide
acctctccagcctctgaccgg

SEQ ID NO: 3222 - DNA, 21 bp, Artificial Sequence
  n-mer motif encoding polynucleotide
catagtggtgctggggttctg

SEQ ID NO: 3223 - DNA, 21 bp, Artificial Sequence
  n-mer motif encoding polynucleotide
gctgctaatcctagtacggag

SEQ ID NO: 3224 - DNA, 21 bp, Artificial Sequence
  n-mer motif encoding polynucleotide
atgttggtacaaaacacaccc

SEQ ID NO: 3225 - DNA, 21 bp, Artificial Sequence
  n-mer motif encoding polynucleotide
gtgcagcagaataatattaat

SEQ ID NO: 3226 - DNA, 21 bp, Artificial Sequence
  n-mer motif encoding polynucleotide
catgatggttatgttcctaat

SEQ ID NO: 3227 - DNA, 21 bp, Artificial Sequence
  n-mer motif encoding polynucleotide
aactcaggtaacaaccccatc

SEQ ID NO: 3228 - DNA, 21 bp, Artificial Sequence
  n-mer motif encoding polynucleotide
acggacaacccgtcctacaaa

SEQ ID NO: 3229 - DNA, 21 bp, Artificial Sequence
  n-mer motif encoding polynucleotide
ggaggcttaagtttatcctcg

SEQ ID NO: 3230 - DNA, 21 bp, Artificial Sequence
  n-mer motif encoding polynucleotide
aataatgagaatacgcgtaat

SEQ ID NO: 3231 - DNA, 21 bp, Artificial Sequence
  n-mer motif encoding polynucleotide
aagaataataattctgattct

SEQ ID NO: 3232 - DNA, 21 bp, Artificial Sequence
  n-mer motif encoding polynucleotide
aaggatgagcatcttcattat

SEQ ID NO: 3233 - DNA, 21 bp, Artificial Sequence
  n-mer motif encoding polynucleotide
aattttactattacggaggcg

SEQ ID NO: 3234 - DNA, 21 bp, Artificial Sequence
  n-mer motif encoding polynucleotide
ttgaaccaaaacagtgtctcc

SEQ ID NO: 3235 - DNA, 21 bp, Artificial Sequence
  n-mer motif encoding polynucleotide
aattctcatgttcctaataat

SEQ ID NO: 3236 - DNA, 21 bp, Artificial Sequence
  n-mer motif encoding polynucleotide
aattctacgcatattaattcg

SEQ ID NO: 3237 - DNA, 21 bp, Artificial Sequence
  n-mer motif encoding polynucleotide
catatgtctagttattcgtcg

SEQ ID NO: 3238 - DNA, 21 bp, Artificial Sequence
  n-mer motif encoding polynucleotide
aacgtacccaacggacaagga

SEQ ID NO: 3239 - DNA, 21 bp, Artificial Sequence
  n-mer motif encoding polynucleotide
aacggtccgaccggatccgcc

SEQ ID NO: 3240 - DNA, 21 bp, Artificial Sequence
  n-mer motif encoding polynucleotide
aaaagcaacgcgggattcggt

SEQ ID NO: 3241 - DNA, 21 bp, Artificial Sequence
  n-mer motif encoding polynucleotide
gcggccgcactagaaacaata

SEQ ID NO: 3242 - DNA, 21 bp, Artificial Sequence
  n-mer motif encoding polynucleotide
aaccgtcaaagggacttcgaa

SEQ ID NO: 3243 - DNA, 21 bp, Artificial Sequence
  n-mer motif encoding polynucleotide
gggtcagggaacgaacccggg

SEQ ID NO: 3244 - DNA, 21 bp, Artificial Sequence
  n-mer motif encoding polynucleotide
gttagtgtggctgtgcctgcg

SEQ ID NO: 3245 - DNA, 21 bp, Artificial Sequence
  n-mer motif encoding polynucleotide
cactctaacacacactacgaa

SEQ ID NO: 3246 - DNA, 21 bp, Artificial Sequence
  n-mer motif encoding polynucleotide
cctgacagagcgaacgacaaa

SEQ ID NO: 3247 - DNA, 21 bp, Artificial Sequence
  n-mer motif encoding polynucleotide
caagttggggctctaatggtt

SEQ ID NO: 3248 - DNA, 21 bp, Artificial Sequence
  n-mer motif encoding polynucleotide
ttaacaccccaagggactagt

SEQ ID NO: 3249 - DNA, 21 bp, Artificial Sequence
  n-mer motif encoding polynucleotide
ctatacgacggaaaacacgtc

SEQ ID NO: 3250 - DNA, 21 bp, Artificial Sequence
  n-mer motif encoding polynucleotide
ctaaccgaatctgtgagaaac

SEQ ID NO: 3251 - DNA, 21 bp, Artificial Sequence
  n-mer motif encoding polynucleotide
agtacttatgggaatacttat

SEQ ID NO: 3252 - DNA, 21 bp, Artificial Sequence
  n-mer motif encoding polynucleotide
aatgctatttctactaataat

SEQ ID NO: 3253 - DNA, 21 bp, Artificial Sequence
  n-mer motif encoding polynucleotide
attgctcatgtgtctactaat

SEQ ID NO: 3254 - DNA, 21 bp, Artificial Sequence
  n-mer motif encoding polynucleotide
agtgaggagaggacgcgtgcg

SEQ ID NO: 3255 - DNA, 21 bp, Artificial Sequence
  n-mer motif encoding polynucleotide
cgttggtctgaaaacaactcc

SEQ ID NO: 3256 - DNA, 21 bp, Artificial Sequence
  n-mer motif encoding polynucleotide
gatggtaataatacgacttat

SEQ ID NO: 3257 - DNA, 21 bp, Artificial Sequence
  n-mer motif encoding polynucleotide
gtgacgactgttgatagtgct

SEQ ID NO: 3258 - DNA, 21 bp, Artificial Sequence
  n-mer motif encoding polynucleotide
accgtaaaacaaacaagtccg

SEQ ID NO: 3259 - DNA, 21 bp, Artificial Sequence
  n-mer motif encoding polynucleotide
tctatctacctcgcgtccact

SEQ ID NO: 3260 - DNA, 21 bp, Artificial Sequence
  n-mer motif encoding polynucleotide
acgacccgaaacgaacactcg

SEQ ID NO: 3261 - DNA, 21 bp, Artificial Sequence
  n-mer motif encoding polynucleotide
tcgtatgatatgcatacgaat

SEQ ID NO: 3262 - DNA, 21 bp, Artificial Sequence
  n-mer motif encoding polynucleotide
gtctctacatacctcctggca

SEQ ID NO: 3263 - DNA, 21 bp, Artificial Sequence
  n-mer motif encoding polynucleotide
ggagaacaaagccacaaccaa

SEQ ID NO: 3264 - DNA, 21 bp, Artificial Sequence
  n-mer motif encoding polynucleotide
actgccaacaaccactctccg

SEQ ID NO: 3265 - DNA, 21 bp, Artificial Sequence
  n-mer motif encoding polynucleotide
caattccacgggacatctgaa

SEQ ID NO: 3266 - DNA, 21 bp, Artificial Sequence
  n-mer motif encoding polynucleotide
aacgttctgggagcgtctagc

SEQ ID NO: 3267 - DNA, 21 bp, Artificial Sequence
  n-mer motif encoding polynucleotide
agggatagtactattagtcgg

SEQ ID NO: 3268 - DNA, 21 bp, Artificial Sequence
  n-mer motif encoding polynucleotide
gttattgggacttctagggat

SEQ ID NO: 3269 - DNA, 21 bp, Artificial Sequence
  n-mer motif encoding polynucleotide
aattatgagaaggagtttgtt

SEQ ID NO: 3270 - DNA, 21 bp, Artificial Sequence
  n-mer motif encoding polynucleotide
atggaccaaagccactcccga

SEQ ID NO: 3271 - DNA, 21 bp, Artificial Sequence
  n-mer motif encoding polynucleotide
aattctcagaatcctcagggt

SEQ ID NO: 3272 - DNA, 21 bp, Artificial Sequence
  n-mer motif encoding polynucleotide
cacacgggcacggacaaccga

SEQ ID NO: 3273 - DNA, 21 bp, Artificial Sequence
  n-mer motif encoding polynucleotide
tataatactgttgatcagcgg

SEQ ID NO: 3274 - DNA, 21 bp, Artificial Sequence
  n-mer motif encoding polynucleotide
aaagaaagcctcgaagacgtc

SEQ ID NO: 3275 - DNA, 21 bp, Artificial Sequence
  n-mer motif encoding polynucleotide
actgcgaatagtacgtatgtg

SEQ ID NO: 3276 - DNA, 21 bp, Artificial Sequence
  n-mer motif encoding polynucleotide
tatctgaatagtacgcagatt

SEQ ID NO: 3277 - DNA, 21 bp, Artificial Sequence
  n-mer motif encoding polynucleotide
cgtgttgaagacaccaactcc

SEQ ID NO: 3278 - DNA, 21 bp, Artificial Sequence
  n-mer motif encoding polynucleotide
aacgacgcacgcaaccgtgca

SEQ ID NO: 3279 - DNA, 21 bp, Artificial Sequence
  n-mer motif encoding polynucleotide
aatactaataatcaggagcag

SEQ ID NO: 3280 - DNA, 21 bp, Artificial Sequence
  n-mer motif encoding polynucleotide
accgtcggatcgaacagtata

SEQ ID NO: 3281 - DNA, 21 bp, Artificial Sequence
  n-mer motif encoding polynucleotide
tatggggagcgtgctaggacg

SEQ ID NO: 3282 - DNA, 21 bp, Artificial Sequence
  n-mer motif encoding polynucleotide
ccgaccggaggctcaccacca

SEQ ID NO: 3283 - DNA, 21 bp, Artificial Sequence
  n-mer motif encoding polynucleotide
cttgggcaggttaattctacg

SEQ ID NO: 3284 - DNA, 21 bp, Artificial Sequence
  n-mer motif encoding polynucleotide
gtctcgggtccggtatcggtc

SEQ ID NO: 3285 - DNA, 21 bp, Artificial Sequence
  n-mer motif encoding polynucleotide
ggtactaatcatgatttttcg

SEQ ID NO: 3286 - DNA, 21 bp, Artificial Sequence
  n-mer motif encoding polynucleotide
aagacgcttgataataatgct

SEQ ID NO: 3287 - DNA, 21 bp, Artificial Sequence
  n-mer motif encoding polynucleotide
cacagtgaactacgtcaaaac

SEQ ID NO: 3288 - DNA, 21 bp, Artificial Sequence
  n-mer motif encoding polynucleotide
gagaagaatctgactaatgct

SEQ ID NO: 3289 - DNA, 21 bp, Artificial Sequence
  n-mer motif encoding polynucleotide
accggactcggaggcaacagt

SEQ ID NO: 3290 - DNA, 21 bp, Artificial Sequence
  n-mer motif encoding polynucleotide
aaagaccacatcctcagcctc

SEQ ID NO: 3291 - DNA, 21 bp, Artificial Sequence
  n-mer motif encoding polynucleotide
ataactactggcggagtgcta

SEQ ID NO: 3292 - DNA, 21 bp, Artificial Sequence
  n-mer motif encoding polynucleotide
ctggctgattcgaattctaag

SEQ ID NO: 3293 - DNA, 21 bp, Artificial Sequence
  n-mer motif encoding polynucleotide
agtatttctgataagaatcag

SEQ ID NO: 3294 - DNA, 21 bp, Artificial Sequence
  n-mer motif encoding polynucleotide
tatattgctgggggggagcag

SEQ ID NO: 3295 - DNA, 21 bp, Artificial Sequence
  n-mer motif encoding polynucleotide
ttgccggataaggggcggatt

SEQ ID NO: 3296 - DNA, 21 bp, Artificial Sequence
  n-mer motif encoding polynucleotide
ttgatccaaacgcaaggcacg

SEQ ID NO: 3297 - DNA, 21 bp, Artificial Sequence
  n-mer motif encoding polynucleotide
tactccggagaactaaacaaa

SEQ ID NO: 3298 - DNA, 21 bp, Artificial Sequence
  n-mer motif encoding polynucleotide
tgcgcatcagaagtttgccaa

SEQ ID NO: 3299 - DNA, 21 bp, Artificial Sequence
  n-mer motif encoding polynucleotide
cttatggctgctaatactgcg

SEQ ID NO: 3300 - DNA, 21 bp, Artificial Sequence
  n-mer motif encoding polynucleotide
catcagtcttttgatgctggt

SEQ ID NO: 3301 - DNA, 21 bp, Artificial Sequence
  n-mer motif encoding polynucleotide
ggggagacgctgaggtctcag

SEQ ID NO: 3302 - DNA, 21 bp, Artificial Sequence
  n-mer motif encoding polynucleotide
cagactgatggtcctaatttt

SEQ ID NO: 3303 - DNA, 21 bp, Artificial Sequence
  n-mer motif encoding polynucleotide
acgacgactaatgtgaatttt

SEQ ID NO: 3304 - DNA, 21 bp, Artificial Sequence
  n-mer motif encoding polynucleotide
aacatgaccaacgaaaacgga

SEQ ID NO: 3305 - DNA, 21 bp, Artificial Sequence
  n-mer motif encoding polynucleotide
gggtatagtccttcgacgccg

SEQ ID NO: 3306 - DNA, 21 bp, Artificial Sequence
  n-mer motif encoding polynucleotide
ttgcaggttacggttcataat

SEQ ID NO: 3307 - DNA, 21 bp, Artificial Sequence
  n-mer motif encoding polynucleotide
gatctgacgcatgttcatcgt

SEQ ID NO: 3308 - DNA, 21 bp, Artificial Sequence
  n-mer motif encoding polynucleotide
acggagcttagtgagtatact

SEQ ID NO: 3309 - DNA, 21 bp, Artificial Sequence
  n-mer motif encoding polynucleotide
atgacagtcgccagtactagc

SEQ ID NO: 3310 - DNA, 21 bp, Artificial Sequence
  n-mer motif encoding polynucleotide
agcagtcaagcccacggccca

SEQ ID NO: 3311 - DNA, 21 bp, Artificial Sequence
  n-mer motif encoding polynucleotide
accagaagcccgaacgaagac

SEQ ID NO: 3312 - DNA, 21 bp, Artificial Sequence
  n-mer motif encoding polynucleotide
gataataataagcatggtact

SEQ ID NO: 3313 - DNA, 21 bp, Artificial Sequence
  n-mer motif encoding polynucleotide
agggagattgttcatagtaat

SEQ ID NO: 3314 - DNA, 21 bp, Artificial Sequence
  n-mer motif encoding polynucleotide
cggaaacttgaactcgaccta

SEQ ID NO: 3315 - DNA, 21 bp, Artificial Sequence
  n-mer motif encoding polynucleotide
atctacgaaaccgtaaccttg

SEQ ID NO: 3316 - DNA, 21 bp, Artificial Sequence
  n-mer motif encoding polynucleotide
aatagtggtagtacgagtttt

SEQ ID NO: 3317 - DNA, 21 bp, Artificial Sequence
  n-mer motif encoding polynucleotide
ccaagtacgaacgaaagccgc

SEQ ID NO: 3318 - DNA, 21 bp, Artificial Sequence
  n-mer motif encoding polynucleotide
caagccgacctcaggtacaaa

SEQ ID NO: 3319 - DNA, 21 bp, Artificial Sequence
  n-mer motif encoding polynucleotide
gatcagccggggtatgtgcgt

SEQ ID NO: 3320 - DNA, 21 bp, Artificial Sequence
  n-mer motif encoding polynucleotide
gatgctatgcttgctcatccg

SEQ ID NO: 3321 - DNA, 21 bp, Artificial Sequence
  n-mer motif encoding polynucleotide
acacgtcacgacggcagtacg

SEQ ID NO: 3322 - DNA, 21 bp, Artificial Sequence
  n-mer motif encoding polynucleotide
ctggcgaatatgagtgcgccg

SEQ ID NO: 3323 - DNA, 21 bp, Artificial Sequence
  n-mer motif encoding polynucleotide
actggtcatccgccggcggcg

SEQ ID NO: 3324 - DNA, 21 bp, Artificial Sequence
  n-mer motif encoding polynucleotide
tcgagtattagtctgcggtat

SEQ ID NO: 3325 - DNA, 21 bp, Artificial Sequence
  n-mer motif encoding polynucleotide
atgcacgtcgacaaaacgagt

SEQ ID NO: 3326 - DNA, 21 bp, Artificial Sequence
  n-mer motif encoding polynucleotide
gggagtgattctaagcatcct

SEQ ID NO: 3327 - DNA, 21 bp, Artificial Sequence
  n-mer motif encoding polynucleotide
ggagaaagctcctcaataagc

SEQ ID NO: 3328 - DNA, 21 bp, Artificial Sequence
  n-mer motif encoding polynucleotide
gtcgtccactcacacagtgaa

SEQ ID NO: 3329 - DNA, 21 bp, Artificial Sequence
  n-mer motif encoding polynucleotide
agtgtgcgggcgcatgttttg

SEQ ID NO: 3330 - DNA, 21 bp, Artificial Sequence
  n-mer motif encoding polynucleotide
gcggatggggctaagtctgct

SEQ ID NO: 3331 - DNA, 21 bp, Artificial Sequence
  n-mer motif encoding polynucleotide
ggggaagcacgccgagaagcc

SEQ ID NO: 3332 - DNA, 21 bp, Artificial Sequence
  n-mer motif encoding polynucleotide
tttaatgctacggtggtgcat

SEQ ID NO: 3333 - DNA, 21 bp, Artificial Sequence
  n-mer motif encoding polynucleotide
tggacggaagggggctcagga

SEQ ID NO: 3334 - DNA, 21 bp, Artificial Sequence
  n-mer motif encoding polynucleotide
gattcttcttatacgcatccg

SEQ ID NO: 3335 - DNA, 21 bp, Artificial Sequence
  n-mer motif encoding polynucleotide
ttcccaagtagggacaacgta

SEQ ID NO: 3336 - DNA, 21 bp, Artificial Sequence
  n-mer motif encoding polynucleotide
gccatcacgcacatcggtaca

SEQ ID NO: 3337 - DNA, 21 bp, Artificial Sequence
  n-mer motif encoding polynucleotide
gcttttaagtcgggtagtatt

SEQ ID NO: 3338 - DNA, 21 bp, Artificial Sequence
  n-mer motif encoding polynucleotide
atgtcaaacgcctcctacata

SEQ ID NO: 3339 - DNA, 21 bp, Artificial Sequence
  n-mer motif encoding polynucleotide
gcggagaggaatgataggacg

SEQ ID NO: 3340 - DNA, 21 bp, Artificial Sequence
  n-mer motif encoding polynucleotide
acattagaaacaacccgcagc

SEQ ID NO: 3341 - DNA, 21 bp, Artificial Sequence
  n-mer motif encoding polynucleotide
cgcttacacggctcagactcg

SEQ ID NO: 3342 - DNA, 21 bp, Artificial Sequence
  n-mer motif encoding polynucleotide
tatgaggggcatatgaatact

SEQ ID NO: 3343 - DNA, 21 bp, Artificial Sequence
  n-mer motif encoding polynucleotide
tctgtgacgactaatctgatg

SEQ ID NO: 3344 - DNA, 21 bp, Artificial Sequence
  n-mer motif encoding polynucleotide
ttgcgtgatcagactagtatg

SEQ ID NO: 3345 - DNA, 21 bp, Artificial Sequence
  n-mer motif encoding polynucleotide
cccgccagtcacagcgcggga

SEQ ID NO: 3346 - DNA, 21 bp, Artificial Sequence
  n-mer motif encoding polynucleotide
gtggttgagaatttgaggcag

SEQ ID NO: 3347 - DNA, 21 bp, Artificial Sequence
  n-mer motif encoding polynucleotide
caacaatcacaaaactctata

SEQ ID NO: 3348 - DNA, 21 bp, Artificial Sequence
  n-mer motif encoding polynucleotide
cttgttgatacggataggaat

SEQ ID NO: 3349 - DNA, 21 bp, Artificial Sequence
  n-mer motif encoding polynucleotide
aacgaaatgggaaactacgtc

SEQ ID NO: 3350 - DNA, 21 bp, Artificial Sequence
  n-mer motif encoding polynucleotide
tccaccgacccccgatactca

SEQ ID NO: 3351 - DNA, 21 bp, Artificial Sequence
  n-mer motif encoding polynucleotide
actaatggtatttatcagcct

SEQ ID NO: 3352 - DNA, 21 bp, Artificial Sequence
  n-mer motif encoding polynucleotide
tgggtaaacagtgtgggcaac

SEQ ID NO: 3353 - DNA, 21 bp, Artificial Sequence
  n-mer motif encoding polynucleotide
ggggtatctaacaactctagc

SEQ ID NO: 3354 - DNA, 21 bp, Artificial Sequence
  n-mer motif encoding polynucleotide
aatgttaatgcgcagagtagg

SEQ ID NO: 3355 - DNA, 21 bp, Artificial Sequence
  n-mer motif encoding polynucleotide
acgacgccgcctttttctaat

SEQ ID NO: 3356 - DNA, 21 bp, Artificial Sequence
  n-mer motif encoding polynucleotide
acaggcagctcccacaccaac

SEQ ID NO: 3357 - DNA, 21 bp, Artificial Sequence
  n-mer motif encoding polynucleotide
tacgtcgacaaatcaatgaca

SEQ ID NO: 3358 - DNA, 21 bp, Artificial Sequence
  n-mer motif encoding polynucleotide
ctaatcaaaaacaacatgctc

SEQ ID NO: 3359 - DNA, 21 bp, Artificial Sequence
  n-mer motif encoding polynucleotide
gggggtacggggttgtcgaag

SEQ ID NO: 3360 - DNA, 21 bp, Artificial Sequence
  n-mer motif encoding polynucleotide
gctcttcataatctgatgaat

SEQ ID NO: 3361 - DNA, 21 bp, Artificial Sequence
  n-mer motif encoding polynucleotide
gtgcatgtgactaatgtgttg

SEQ ID NO: 3362 - DNA, 21 bp, Artificial Sequence
  n-mer motif encoding polynucleotide
tcgacgacgcacccttccgaa

SEQ ID NO: 3363 - DNA, 21 bp, Artificial Sequence
  n-mer motif encoding polynucleotide
agcgtaggtagtccaacacac

SEQ ID NO: 3364 - DNA, 21 bp, Artificial Sequence
  n-mer motif encoding polynucleotide
atgagtaatgatttgcctggg

SEQ ID NO: 3365 - DNA, 21 bp, Artificial Sequence
  n-mer motif encoding polynucleotide
ttctcgtcaaccgaagccaga

SEQ ID NO: 3366 - DNA, 21 bp, Artificial Sequence
  n-mer motif encoding polynucleotide
gccggtcaccaacaactggcc

SEQ ID NO: 3367 - DNA, 21 bp, Artificial Sequence
  n-mer motif encoding polynucleotide
ggtaccatattaccaaaccaa

SEQ ID NO: 3368 - DNA, 21 bp, Artificial Sequence
  n-mer motif encoding polynucleotide
agcgcggtttctggtagcagc

SEQ ID NO: 3369 - DNA, 21 bp, Artificial Sequence
  n-mer motif encoding polynucleotide
gaggtgtctagggatggtctg

SEQ ID NO: 3370 - DNA, 21 bp, Artificial Sequence
  n-mer motif encoding polynucleotide
caatcactcaaagacggcact

SEQ ID NO: 3371 - DNA, 21 bp, Artificial Sequence
  n-mer motif encoding polynucleotide
acgcgtgagggtaatcatgct

SEQ ID NO: 3372 - DNA, 21 bp, Artificial Sequence
  n-mer motif encoding polynucleotide
gtggcgacccaaaaccttctt

SEQ ID NO: 3373 - DNA, 21 bp, Artificial Sequence
  n-mer motif encoding polynucleotide
gccgaaatgacgcaccgcctc

SEQ ID NO: 3374 - DNA, 21 bp, Artificial Sequence
  n-mer motif encoding polynucleotide
caacggccagacccgcttaaa

SEQ ID NO: 3375 - DNA, 21 bp, Artificial Sequence
  n-mer motif encoding polynucleotide
gaacacatctctagctacgga

SEQ ID NO: 3376 - DNA, 21 bp, Artificial Sequence
  n-mer motif encoding polynucleotide
caaaaaagcaacgaccaaaac

SEQ ID NO: 3377 - DNA, 21 bp, Artificial Sequence
  n-mer motif encoding polynucleotide
aatcttgtgatgagtgggacg

SEQ ID NO: 3378 - DNA, 21 bp, Artificial Sequence
  n-mer motif encoding polynucleotide
ggagcgggacaatctcacgtg

SEQ ID NO: 3379 - DNA, 21 bp, Artificial Sequence
  n-mer motif encoding polynucleotide
ctcaaccacacaatgcccctc

SEQ ID NO: 3380 - DNA, 21 bp, Artificial Sequence
  n-mer motif encoding polynucleotide
gtatcacaatcacacgacgtg

SEQ ID NO: 3381 - DNA, 21 bp, Artificial Sequence
  n-mer motif encoding polynucleotide
gctaattctgctactaatcag

SEQ ID NO: 3382 - DNA, 21 bp, Artificial Sequence
  n-mer motif encoding polynucleotide
ggcacaggaggtaaccgagaa

SEQ ID NO: 3383 - DNA, 21 bp, Artificial Sequence
  n-mer motif encoding polynucleotide
gcgaagtcgtcgattattttg

SEQ ID NO: 3384 - DNA, 21 bp, Artificial Sequence
  n-mer motif encoding polynucleotide
ggaggaacagcccttgggagc

SEQ ID NO: 3385 - DNA, 21 bp, Artificial Sequence
  n-mer motif encoding polynucleotide
aacaaagtagaatctgaccca

SEQ ID NO: 3386 - DNA, 21 bp, Artificial Sequence
  n-mer motif encoding polynucleotide
aactcgaaacaacccgacgtc

SEQ ID NO: 3387 - DNA, 21 bp, Artificial Sequence
  n-mer motif encoding polynucleotide
agttatgctgatcgtcggctg

SEQ ID NO: 3388 - DNA, 21 bp, Artificial Sequence
  n-mer motif encoding polynucleotide
aatgtgaatccgaatgggccg

SEQ ID NO: 3389 - DNA, 21 bp, Artificial Sequence
  n-mer motif encoding polynucleotide
gaacacaactcaaaaacttac

SEQ ID NO: 3390 - DNA, 21 bp, Artificial Sequence
  n-mer motif encoding polynucleotide
acccaaggatctaacaccaca

SEQ ID NO: 3391 - DNA, 21 bp, Artificial Sequence
  n-mer motif encoding polynucleotide
agcaacgtatcagcttacgca

SEQ ID NO: 3392 - DNA, 21 bp, Artificial Sequence
  n-mer motif encoding polynucleotide
gcgtacagtgacagcgcccgc

SEQ ID NO: 3393 - DNA, 21 bp, Artificial Sequence
  n-mer motif encoding polynucleotide
gggtcgcaatacgcgaaccgc

SEQ ID NO: 3394 - DNA, 21 bp, Artificial Sequence
  n-mer motif encoding polynucleotide
acaatgagcgtaactctggaa

SEQ ID NO: 3395 - DNA, 21 bp, Artificial Sequence
  n-mer motif encoding polynucleotide
cagacgactattctggctgct

SEQ ID NO: 3396 - DNA, 21 bp, Artificial Sequence
  n-mer motif encoding polynucleotide
ttgctccaatccatagtggta

SEQ ID NO: 3397 - DNA, 21 bp, Artificial Sequence
  n-mer motif encoding polynucleotide
gttcacgctaacgctacatta

SEQ ID NO: 3398 - DNA, 21 bp, Artificial Sequence
  n-mer motif encoding polynucleotide
aacaaaacaaacgccgactac

SEQ ID NO: 3399 - DNA, 21 bp, Artificial Sequence
  n-mer motif encoding polynucleotide
aactacgacaccggcgccaaa

SEQ ID NO: 3400 - DNA, 21 bp, Artificial Sequence
  n-mer motif encoding polynucleotide
gtctaccacaaccgcgacgtt

SEQ ID NO: 3401 - DNA, 21 bp, Artificial Sequence
  n-mer motif encoding polynucleotide
gattctgctccgaggtctatt

SEQ ID NO: 3402 - DNA, 21 bp, Artificial Sequence
  n-mer motif encoding polynucleotide
ttgattgcgaatctgagtaat

SEQ ID NO: 3403 - DNA, 21 bp, Artificial Sequence
  n-mer motif encoding polynucleotide
ccgcaagacgtccgccaaaca

SEQ ID NO: 3404 - DNA, 21 bp, Artificial Sequence
  n-mer motif encoding polynucleotide
acaatgacagcaatagcaatg

SEQ ID NO: 3405 - DNA, 21 bp, Artificial Sequence
  n-mer motif encoding polynucleotide
acatacgcctctactgaagcg

SEQ ID NO: 3406 - DNA, 21 bp, Artificial Sequence
  n-mer motif encoding polynucleotide
cctcacgccaacggagtgaca

SEQ ID NO: 3407 - DNA, 21 bp, Artificial Sequence
  n-mer motif encoding polynucleotide
cgggctgatgtttcttggtct

SEQ ID NO: 3408 - DNA, 21 bp, Artificial Sequence
  n-mer motif encoding polynucleotide
ctgacgcacatgaccggaacc

SEQ ID NO: 3409 - DNA, 21 bp, Artificial Sequence
  n-mer motif encoding polynucleotide
gcaaacgactctgccaaaaca

SEQ ID NO: 3410 - DNA, 21 bp, Artificial Sequence
  n-mer motif encoding polynucleotide
gctaattctgggttgcataat

SEQ ID NO: 3411 - DNA, 21 bp, Artificial Sequence
  n-mer motif encoding polynucleotide
aacgtgggcaccgacagagac

SEQ ID NO: 3412 - DNA, 21 bp, Artificial Sequence
  n-mer motif encoding polynucleotide
gtcggaacaacctcgaacggc

SEQ ID NO: 3413 - DNA, 21 bp, Artificial Sequence
  n-mer motif encoding polynucleotide
ggagttcttgggatactggtc

SEQ ID NO: 3414 - DNA, 21 bp, Artificial Sequence
  n-mer motif encoding polynucleotide
cgaatcaacgcagcaatcgac

SEQ ID NO: 3415 - DNA, 21 bp, Artificial Sequence
  n-mer motif encoding polynucleotide
cccgacactcgcccatccata

SEQ ID NO: 3416 - DNA, 21 bp, Artificial Sequence
  n-mer motif encoding polynucleotide
ggtgaatcacgtacaaacatg

SEQ ID NO: 3417 - DNA, 21 bp, Artificial Sequence
  n-mer motif encoding polynucleotide
attttgcttgctcagtctgct

SEQ ID NO: 3418 - DNA, 21 bp, Artificial Sequence
  n-mer motif encoding polynucleotide
tataatagggataatggttct

SEQ ID NO: 3419 - DNA, 21 bp, Artificial Sequence
  n-mer motif encoding polynucleotide
tggaatagtccgggtgaggcg

SEQ ID NO: 3420 - DNA, 21 bp, Artificial Sequence
  n-mer motif encoding polynucleotide
ctgttgggggctcatcagccg

SEQ ID NO: 3421 - DNA, 21 bp, Artificial Sequence
  n-mer motif encoding polynucleotide
attggtaaggatagtgttccg

SEQ ID NO: 3422 - DNA, 21 bp, Artificial Sequence
  n-mer motif encoding polynucleotide
acgcgggagagtctggtggat

SEQ ID NO: 3423 - DNA, 21 bp, Artificial Sequence
  n-mer motif encoding polynucleotide
gcctctaaccacctacaagcc

SEQ ID NO: 3424 - DNA, 21 bp, Artificial Sequence
  n-mer motif encoding polynucleotide
aatcttcagacgggtaaggct

SEQ ID NO: 3425 - DNA, 21 bp, Artificial Sequence
  n-mer motif encoding polynucleotide
actgtaggatcctcatacgct

SEQ ID NO: 3426 - DNA, 21 bp, Artificial Sequence
  n-mer motif encoding polynucleotide
gacactaacggaataaaatca

SEQ ID NO: 3427 - DNA, 21 bp, Artificial Sequence
  n-mer motif encoding polynucleotide
agtctgcggatggagaatagt

SEQ ID NO: 3428 - DNA, 21 bp, Artificial Sequence
  n-mer motif encoding polynucleotide
actaagggtaataatctggtt

SEQ ID NO: 3429 - DNA, 21 bp, Artificial Sequence
  n-mer motif encoding polynucleotide
catacgaatcagatgcagcct

SEQ ID NO: 3430 - DNA, 21 bp, Artificial Sequence
  n-mer motif encoding polynucleotide
aacggcaactacgacggcgcg

SEQ ID NO: 3431 - DNA, 21 bp, Artificial Sequence
  n-mer motif encoding polynucleotide
gaggcgcataatcgtggtaat

SEQ ID NO: 3432 - DNA, 21 bp, Artificial Sequence
  n-mer motif encoding polynucleotide
gggacggttaactcaagtgca

SEQ ID NO: 3433 - DNA, 21 bp, Artificial Sequence
  n-mer motif encoding polynucleotide
gggccgacgatgaatcataat

SEQ ID NO: 3434 - DNA, 21 bp, Artificial Sequence
  n-mer motif encoding polynucleotide
gtacccaacaacaacacttcg

SEQ ID NO: 3435 - DNA, 21 bp, Artificial Sequence
  n-mer motif encoding polynucleotide
gtttctaacaaatctggaagt

SEQ ID NO: 3436 - DNA, 21 bp, Artificial Sequence
  n-mer motif encoding polynucleotide
tggggagtcagtaactcagca

SEQ ID NO: 3437 - DNA, 21 bp, Artificial Sequence
  n-mer motif encoding polynucleotide
gtctctaacgtcctctacagc

SEQ ID NO: 3438 - DNA, 21 bp, Artificial Sequence
  n-mer motif encoding polynucleotide
gccggccaaaacagtgtgggc

SEQ ID NO: 3439 - DNA, 21 bp, Artificial Sequence
  n-mer motif encoding polynucleotide
ggtacgagtctggagaatagg

SEQ ID NO: 3440 - DNA, 21 bp, Artificial Sequence
  n-mer motif encoding polynucleotide
cagatgaatattcatgataag

SEQ ID NO: 3441 - DNA, 21 bp, Artificial Sequence
  n-mer motif encoding polynucleotide
cctcaactaagcggcacagcg

SEQ ID NO: 3442 - DNA, 21 bp, Artificial Sequence
  n-mer motif encoding polynucleotide
agttcgactccgcaggatact

SEQ ID NO: 3443 - DNA, 21 bp, Artificial Sequence
  n-mer motif encoding polynucleotide
gtgcaggggcagaccggctgg

SEQ ID NO: 3444 - DNA, 21 bp, Artificial Sequence
  n-mer motif encoding polynucleotide
ggtctgacgggtgatttggtt

SEQ ID NO: 3445 - DNA, 21 bp, Artificial Sequence
  n-mer motif encoding polynucleotide
aaccaccccgcaccaagctca

SEQ ID NO: 3446 - DNA, 21 bp, Artificial Sequence
  n-mer motif encoding polynucleotide
aaagaaaaaaccacccgcgaa

SEQ ID NO: 3447 - DNA, 21 bp, Artificial Sequence
  n-mer motif encoding polynucleotide
actactaatccgcagacgcag

SEQ ID NO: 3448 - DNA, 21 bp, Artificial Sequence
  n-mer motif encoding polynucleotide
ggaggtgaacacgcaagaaac

SEQ ID NO: 3449 - DNA, 21 bp, Artificial Sequence
  n-mer motif encoding polynucleotide
acgaccgaagctgttgtagca

SEQ ID NO: 3450 - DNA, 21 bp, Artificial Sequence
  n-mer motif encoding polynucleotide
caaaacagtgacctcgccagc

SEQ ID NO: 3451 - DNA, 21 bp, Artificial Sequence
  n-mer motif encoding polynucleotide
tactctacagaagcacgagtc

SEQ ID NO: 3452 - DNA, 21 bp, Artificial Sequence
  n-mer motif encoding polynucleotide
accggacaagcgggcggatcg

SEQ ID NO: 3453 - DNA, 21 bp, Artificial Sequence
  n-mer motif encoding polynucleotide
acttcgtctaatctttatgtg

SEQ ID NO: 3454 - DNA, 21 bp, Artificial Sequence
  n-mer motif encoding polynucleotide
acggctcgtgcgattgatatg

SEQ ID NO: 3455 - DNA, 21 bp, Artificial Sequence
  n-mer motif encoding polynucleotide
caggagtctaataggggggtg

SEQ ID NO: 3456 - DNA, 21 bp, Artificial Sequence
  n-mer motif encoding polynucleotide
agtatcggattctcagtaggc

SEQ ID NO: 3457 - DNA, 21 bp, Artificial Sequence
  n-mer motif encoding polynucleotide
gagcggagtacgcataatgtt

SEQ ID NO: 3458 - DNA, 21 bp, Artificial Sequence
  n-mer motif encoding polynucleotide
gcaaaccacgacaacatcgtg

SEQ ID NO: 3459 - DNA, 21 bp, Artificial Sequence
  n-mer motif encoding polynucleotide
tgggctatgaataatgtgccg

SEQ ID NO: 3460 - DNA, 21 bp, Artificial Sequence
  n-mer motif encoding polynucleotide
tatattgctgcgggtgagcag

SEQ ID NO: 3461 - DNA, 21 bp, Artificial Sequence
  n-mer motif encoding polynucleotide
agttcgaatacttctggtagt

SEQ ID NO: 3462 - DNA, 21 bp, Artificial Sequence
  n-mer motif encoding polynucleotide
atggggaagcatgagggtctt

SEQ ID NO: 3463 - DNA, 21 bp, Artificial Sequence
  n-mer motif encoding polynucleotide
gtgcttactcatctgccgacg

SEQ ID NO: 3464 - DNA, 21 bp, Artificial Sequence
  n-mer motif encoding polynucleotide
gaaatgggtaaccaataccca

SEQ ID NO: 3465 - DNA, 21 bp, Artificial Sequence
  n-mer motif encoding polynucleotide
agtctgcgtccaaccctacct

SEQ ID NO: 3466 - DNA, 21 bp, Artificial Sequence
  n-mer motif encoding polynucleotide
tcggctaacttatacaaacaa

SEQ ID NO: 3467 - DNA, 21 bp, Artificial Sequence
  n-mer motif encoding polynucleotide
caaaacgacagaaaaccggac

SEQ ID NO: 3468 - DNA, 21 bp, Artificial Sequence
  n-mer motif encoding polynucleotide
attatttcgggtattacggtg

SEQ ID NO: 3469 - DNA, 21 bp, Artificial Sequence
  n-mer motif encoding polynucleotide
ccatccgaaatgagggccgta

SEQ ID NO: 3470 - DNA, 21 bp, Artificial Sequence
  n-mer motif encoding polynucleotide
ttggttacgcagacgccgaat

SEQ ID NO: 3471 - DNA, 21 bp, Artificial Sequence
  n-mer motif encoding polynucleotide
attgcgcagaatgagacgtat

SEQ ID NO: 3472 - DNA, 21 bp, Artificial Sequence
  n-mer motif encoding polynucleotide
ccatacttaagaaacatggcg

SEQ ID NO: 3473 - DNA, 21 bp, Artificial Sequence
  n-mer motif encoding polynucleotide
ggcgtgaacacaaaaatcgaa

SEQ ID NO: 3474 - DNA, 21 bp, Artificial Sequence
  n-mer motif encoding polynucleotide
tactcttctgaaatgagcgaa

SEQ ID NO: 3475 - DNA, 21 bp, Artificial Sequence
  n-mer motif encoding polynucleotide
ttagaaaacccaacaccagca

SEQ ID NO: 3476 - DNA, 21 bp, Artificial Sequence
  n-mer motif encoding polynucleotide
ggtgttatgtctaatgctact

SEQ ID NO: 3477 - DNA, 21 bp, Artificial Sequence
  n-mer motif encoding polynucleotide
gcccacactgcattagcgggg

SEQ ID NO: 3478 - DNA, 21 bp, Artificial Sequence
  n-mer motif encoding polynucleotide
cctgttgtgagggatcgttct

SEQ ID NO: 3479 - DNA, 21 bp, Artificial Sequence
  n-mer motif encoding polynucleotide
tctgcgggtatggtgagtctg

SEQ ID NO: 3480 - DNA, 21 bp, Artificial Sequence
  n-mer motif encoding polynucleotide
tcgggtgttaatagtgagcgt

SEQ ID NO: 3481 - DNA, 21 bp, Artificial Sequence
  n-mer motif encoding polynucleotide
aatggggatgttactaatatg

SEQ ID NO: 3482 - DNA, 21 bp, Artificial Sequence
  n-mer motif encoding polynucleotide
tctgttgtgcctacggataag

SEQ ID NO: 3483 - DNA, 21 bp, Artificial Sequence
  n-mer motif encoding polynucleotide
agtaagggtgatcagcttaat

SEQ ID NO: 3484 - DNA, 21 bp, Artificial Sequence
  n-mer motif encoding polynucleotide
gacggagaatcccgattatca

SEQ ID NO: 3485 - DNA, 21 bp, Artificial Sequence
  n-mer motif encoding polynucleotide
ggtaatatgaatcatagtatt

SEQ ID NO: 3486 - DNA, 21 bp, Artificial Sequence
  n-mer motif encoding polynucleotide
agtgggcatgcttctcagggt

SEQ ID NO: 3487 - DNA, 21 bp, Artificial Sequence
  n-mer motif encoding polynucleotide
ggttggagtaataatgagttg

SEQ ID NO: 3488 - DNA, 21 bp, Artificial Sequence
  n-mer motif encoding polynucleotide
ggtgtgcatactcatactgtt

SEQ ID NO: 3489 - DNA, 21 bp, Artificial Sequence
  n-mer motif encoding polynucleotide
cacgtgacagtaacgttaaac

SEQ ID NO: 3490 - DNA, 21 bp, Artificial Sequence
  n-mer motif encoding polynucleotide
acccgtggcaacgacatatca

SEQ ID NO: 3491 - DNA, 21 bp, Artificial Sequence
  n-mer motif encoding polynucleotide
agcaaaggcggcgacatggtt

SEQ ID NO: 3492 - DNA, 21 bp, Artificial Sequence
  n-mer motif encoding polynucleotide
acgcatggtgatcatattcag

SEQ ID NO: 3493 - DNA, 21 bp, Artificial Sequence
  n-mer motif encoding polynucleotide
actacgaattctcatgcgatt

SEQ ID NO: 3494 - DNA, 21 bp, Artificial Sequence
  n-mer motif encoding polynucleotide
gtcagaacagtccttcaacaa

SEQ ID NO: 3495 - DNA, 21 bp, Artificial Sequence
  n-mer motif encoding polynucleotide
actgtgcgttcgcctcagccg

SEQ ID NO: 3496 - DNA, 21 bp, Artificial Sequence
  n-mer motif encoding polynucleotide
aatacttatactgctggtaag

SEQ ID NO: 3497 - DNA, 21 bp, Artificial Sequence
  n-mer motif encoding polynucleotide
attagtaatccggagaatacg

SEQ ID NO: 3498 - DNA, 21 bp, Artificial Sequence
  n-mer motif encoding polynucleotide
atcgggtcgccgttggccaac

SEQ ID NO: 3499 - DNA, 21 bp, Artificial Sequence
  n-mer motif encoding polynucleotide
tatacgggtactcttgttgtt

SEQ ID NO: 3500 - DNA, 21 bp, Artificial Sequence
  n-mer motif encoding polynucleotide
gggcggcacacattagcggac

SEQ ID NO: 3501 - DNA, 21 bp, Artificial Sequence
  n-mer motif encoding polynucleotide
actgatgggccgcgtctggct

SEQ ID NO: 3502 - DNA, 21 bp, Artificial Sequence
  n-mer motif encoding polynucleotide
ggggcaggaaacctgggtacc

SEQ ID NO: 3503 - DNA, 21 bp, Artificial Sequence
  n-mer motif encoding polynucleotide
ctgatgaatcgtaatgctcct

SEQ ID NO: 3504 - DNA, 21 bp, Artificial Sequence
  n-mer motif encoding polynucleotide
aatgctatggcttctagtagg

SEQ ID NO: 3505 - DNA, 21 bp, Artificial Sequence
  n-mer motif encoding polynucleotide
cagcatcgtgcgcaggatgtg

SEQ ID NO: 3506 - DNA, 21 bp, Artificial Sequence
  n-mer motif encoding polynucleotide
aaaatagaaagcggaaccata

SEQ ID NO: 3507 - DNA, 21 bp, Artificial Sequence
  n-mer motif encoding polynucleotide
actaattatcctgaggcgaat

SEQ ID NO: 3508 - DNA, 21 bp, Artificial Sequence
  n-mer motif encoding polynucleotide
gtataccacggggtagccagc

SEQ ID NO: 3509 - DNA, 21 bp, Artificial Sequence
  n-mer motif encoding polynucleotide
tccaacgtccacgtagtaaac

SEQ ID NO: 3510 - DNA, 21 bp, Artificial Sequence
  n-mer motif encoding polynucleotide
acatacaccgacgggaacccc

SEQ ID NO: 3511 - DNA, 21 bp, Artificial Sequence
  n-mer motif encoding polynucleotide
tttattgcgaatacgaatcct

SEQ ID NO: 3512 - DNA, 21 bp, Artificial Sequence
  n-mer motif encoding polynucleotide
gacgccgggtacggccacgac

SEQ ID NO: 3513 - DNA, 21 bp, Artificial Sequence
  n-mer motif encoding polynucleotide
ggtcttagtcggaatgatggt

SEQ ID NO: 3514 - DNA, 21 bp, Artificial Sequence
  n-mer motif encoding polynucleotide
atgatgggcgcgacaacgaaa

SEQ ID NO: 3515 - DNA, 21 bp, Artificial Sequence
  n-mer motif encoding polynucleotide
cccatcaacgtactcacgaca

SEQ ID NO: 3516 - DNA, 21 bp, Artificial Sequence
  n-mer motif encoding polynucleotide
gccgtagaccaatcacgtttg

SEQ ID NO: 3517 - DNA, 21 bp, Artificial Sequence
  n-mer motif encoding polynucleotide
aacgcttctacctacatggac

SEQ ID NO: 3518 - DNA, 21 bp, Artificial Sequence
  n-mer motif encoding polynucleotide
acacaagcaggtcttgcgtca

SEQ ID NO: 3519 - DNA, 21 bp, Artificial Sequence
  n-mer motif encoding polynucleotide
gcacaattcgaatcaggccga

SEQ ID NO: 3520 - DNA, 21 bp, Artificial Sequence
  n-mer motif encoding polynucleotide
cggaatggtggtactacggat

SEQ ID NO: 3521 - DNA, 21 bp, Artificial Sequence
  n-mer motif encoding polynucleotide
gctaatacgtataatgttcag

SEQ ID NO: 3522 - DNA, 21 bp, Artificial Sequence
  n-mer motif encoding polynucleotide
tcgggtgttcatagtgagcgt

SEQ ID NO: 3523 - DNA, 21 bp, Artificial Sequence
  n-mer motif encoding polynucleotide
aacaccggcaccacgagtgtc

SEQ ID NO: 3524 - DNA, 21 bp, Artificial Sequence
  n-mer motif encoding polynucleotide
agtacgagtaatagtcatatg

SEQ ID NO: 3525 - DNA, 21 bp, Artificial Sequence
  n-mer motif encoding polynucleotide
ggtgaacaacacaacgccccc

SEQ ID NO: 3526 - DNA, 21 bp, Artificial Sequence
  n-mer motif encoding polynucleotide
gctcatcatatgacgacggag

SEQ ID NO: 3527 - DNA, 21 bp, Artificial Sequence
  n-mer motif encoding polynucleotide
ttgatgactggtactgcgtcg

SEQ ID NO: 3528 - DNA, 21 bp, Artificial Sequence
  n-mer motif encoding polynucleotide
gctgccggagccgactctcca

SEQ ID NO: 3529 - DNA, 21 bp, Artificial Sequence
  n-mer motif encoding polynucleotide
gtgtctctgagttcgcctccg

SEQ ID NO: 3530 - DNA, 21 bp, Artificial Sequence
  n-mer motif encoding polynucleotide
cgtgttgtagccggtcccaac

SEQ ID NO: 3531 - DNA, 21 bp, Artificial Sequence
  n-mer motif encoding polynucleotide
gataagactgagatgctgcag

SEQ ID NO: 3532 - DNA, 21 bp, Artificial Sequence
  n-mer motif encoding polynucleotide
gcacgagacgacacgatacaa

SEQ ID NO: 3533 - DNA, 21 bp, Artificial Sequence
  n-mer motif encoding polynucleotide
ttacaccttgggttatcatct

SEQ ID NO: 3534 - DNA, 21 bp, Artificial Sequence
  n-mer motif encoding polynucleotide
ctcgaaggacaacgggacgtc

SEQ ID NO: 3535 - DNA, 21 bp, Artificial Sequence
  n-mer motif encoding polynucleotide
gcgtcgttgtcggctccggcg

SEQ ID NO: 3536 - DNA, 21 bp, Artificial Sequence
  n-mer motif encoding polynucleotide
agcaaccctgggaaccacaac

SEQ ID NO: 3537 - DNA, 21 bp, Artificial Sequence
  n-mer motif encoding polynucleotide
gggctgaattctaaggggact

SEQ ID NO: 3538 - DNA, 21 bp, Artificial Sequence
  n-mer motif encoding polynucleotide
aaaacaccctcagcttcagaa

SEQ ID NO: 3539 - DNA, 21 bp, Artificial Sequence
  n-mer motif encoding polynucleotide
gtgctggcgtcgactgagaag

SEQ ID NO: 3540 - DNA, 21 bp, Artificial Sequence
  n-mer motif encoding polynucleotide
tcggtattgaacaaaccaaca

SEQ ID NO: 3541 - DNA, 21 bp, Artificial Sequence
  n-mer motif encoding polynucleotide
cccggtaacggacaaagtccg

SEQ ID NO: 3542 - DNA, 21 bp, Artificial Sequence
  n-mer motif encoding polynucleotide
atcttgatgggcgctaggaca

SEQ ID NO: 3543 - DNA, 21 bp, Artificial Sequence
  n-mer motif encoding polynucleotide
gcactaccatcccactcctcc

SEQ ID NO: 3544 - DNA, 21 bp, Artificial Sequence
  n-mer motif encoding polynucleotide
agggatcagactcatccgaat

SEQ ID NO: 3545 - DNA, 21 bp, Artificial Sequence
  n-mer motif encoding polynucleotide
tctggtccgattcctgctgtt

SEQ ID NO: 3546 - DNA, 21 bp, Artificial Sequence
  n-mer motif encoding polynucleotide
tacgtggacgacaacagtcgc

SEQ ID NO: 3547 - DNA, 21 bp, Artificial Sequence
  n-mer motif encoding polynucleotide
ttgactcggggggtcgccgca

SEQ ID NO: 3548 - DNA, 21 bp, Artificial Sequence
  n-mer motif encoding polynucleotide
tctgagaaggaggctcggctg

SEQ ID NO: 3549 - DNA, 21 bp, Artificial Sequence
  n-mer motif encoding polynucleotide
tccacaacgcctcccttcaaa

SEQ ID NO: 3550 - DNA, 21 bp, Artificial Sequence
  n-mer motif encoding polynucleotide
tactcgacaaccatgcttaac

SEQ ID NO: 3551 - DNA, 21 bp, Artificial Sequence
  n-mer motif encoding polynucleotide
aaaaacggtgttataaacgac

SEQ ID NO: 3552 - DNA, 21 bp, Artificial Sequence
  n-mer motif encoding polynucleotide
ttcggtatagggcacggaaca

SEQ ID NO: 3553 - DNA, 21 bp, Artificial Sequence
  n-mer motif encoding polynucleotide
cctcttcatgttgcttctcct

SEQ ID NO: 3554 - DNA, 21 bp, Artificial Sequence
  n-mer motif encoding polynucleotide
ttgggtaatggtagttctttg

SEQ ID NO: 3555 - DNA, 21 bp, Artificial Sequence
  n-mer motif encoding polynucleotide
agtggcaacgcgaacatagta

SEQ ID NO: 3556 - DNA, 21 bp, Artificial Sequence
  n-mer motif encoding polynucleotide
gggattaatcgtactagtgag

SEQ ID NO: 3557 - DNA, 21 bp, Artificial Sequence
  n-mer motif encoding polynucleotide
tcggataataggaatactgcg

SEQ ID NO: 3558 - DNA, 21 bp, Artificial Sequence
  n-mer motif encoding polynucleotide
cgattaggaaccgtcaccaac

SEQ ID NO: 3559 - DNA, 21 bp, Artificial Sequence
  n-mer motif encoding polynucleotide
gtggagcatgttgctcatcag

SEQ ID NO: 3560 - DNA, 21 bp, Artificial Sequence
  n-mer motif encoding polynucleotide
tatactaagcatcctgttgag

SEQ ID NO: 3561 - DNA, 21 bp, Artificial Sequence
  n-mer motif encoding polynucleotide
tcccgaatcacggtgaacgca

SEQ ID NO: 3562 - DNA, 21 bp, Artificial Sequence
  n-mer motif encoding polynucleotide
acagtatcgtcatacgtacaa

SEQ ID NO: 3563 - DNA, 21 bp, Artificial Sequence
  n-mer motif encoding polynucleotide
cgcgccgaagggagctctggc

SEQ ID NO: 3564 - DNA, 21 bp, Artificial Sequence
  n-mer motif encoding polynucleotide
gctgtggggcggtcggatgat

SEQ ID NO: 3565 - DNA, 21 bp, Artificial Sequence
  n-mer motif encoding polynucleotide
cgcataggcgttggagcacca

SEQ ID NO: 3566 - DNA, 21 bp, Artificial Sequence
  n-mer motif encoding polynucleotide
tactcaaacctcgtactttcc

SEQ ID NO: 3567 - DNA, 21 bp, Artificial Sequence
  n-mer motif encoding polynucleotide
tcgacgaattctgaggcggtt

SEQ ID NO: 3568 - DNA, 21 bp, Artificial Sequence
  n-mer motif encoding polynucleotide
gcaatgtcaacccacatgata

SEQ ID NO: 3569 - DNA, 21 bp, Artificial Sequence
  n-mer motif encoding polynucleotide
agggttgatatttcgcatttt

SEQ ID NO: 3570 - DNA, 21 bp, Artificial Sequence
  n-mer motif encoding polynucleotide
attcttacgcctttggataag

SEQ ID NO: 3571 - DNA, 21 bp, Artificial Sequence
  n-mer motif encoding polynucleotide
gttgcgagtacgacgcagact

SEQ ID NO: 3572 - DNA, 21 bp, Artificial Sequence
  n-mer motif encoding polynucleotide
gaccgtagctccgcgacgctc

SEQ ID NO: 3573 - DNA, 21 bp, Artificial Sequence
  n-mer motif encoding polynucleotide
gatcatagtgagcagaattcg

SEQ ID NO: 3574 - DNA, 21 bp, Artificial Sequence
  n-mer motif encoding polynucleotide
atacgcagcgaattggaagta

SEQ ID NO: 3575 - DNA, 21 bp, Artificial Sequence
  n-mer motif encoding polynucleotide
gcgaatctgggtgatgttgag

SEQ ID NO: 3576 - DNA, 21 bp, Artificial Sequence
  n-mer motif encoding polynucleotide
gagcttaaggagagtcagaag

SEQ ID NO: 3577 - DNA, 21 bp, Artificial Sequence
  n-mer motif encoding polynucleotide
tcatacacagcaggaagaccc

SEQ ID NO: 3578 - DNA, 21 bp, Artificial Sequence
  n-mer motif encoding polynucleotide
ggaccagcctacaaccaaagc

SEQ ID NO: 3579 - DNA, 21 bp, Artificial Sequence
  n-mer motif encoding polynucleotide
catgagagtcattatgttagt

SEQ ID NO: 3580 - DNA, 21 bp, Artificial Sequence
  n-mer motif encoding polynucleotide
aatggtaagctgggtacgact

SEQ ID NO: 3581 - DNA, 21 bp, Artificial Sequence
  n-mer motif encoding polynucleotide
cttccgcctgcgtcggcgggt

SEQ ID NO: 3582 - DNA, 21 bp, Artificial Sequence
  n-mer motif encoding polynucleotide
ttgtcgtatcagactggtcat

SEQ ID NO: 3583 - DNA, 21 bp, Artificial Sequence
  n-mer motif encoding polynucleotide
gacagccaaatcacaagacta

SEQ ID NO: 3584 - DNA, 21 bp, Artificial Sequence
  n-mer motif encoding polynucleotide
aacgtatacgaagggcaccgc

SEQ ID NO: 3585 - DNA, 21 bp, Artificial Sequence
  n-mer motif encoding polynucleotide
ttgtttactgctgggagtact

SEQ ID NO: 3586 - DNA, 21 bp, Artificial Sequence
  n-mer motif encoding polynucleotide
cttgtgaataatgatgggact

SEQ ID NO: 3587 - DNA, 21 bp, Artificial Sequence
  n-mer motif encoding polynucleotide
gcgatgaatgtgcggagtgat

SEQ ID NO: 3588 - DNA, 21 bp, Artificial Sequence
  n-mer motif encoding polynucleotide
gccagccttgaccgccttcca

SEQ ID NO: 3589 - DNA, 21 bp, Artificial Sequence
  n-mer motif encoding polynucleotide
ggctctcggaacggacccaca

SEQ ID NO: 3590 - DNA, 21 bp, Artificial Sequence
  n-mer motif encoding polynucleotide
atgagtgatgggcattcgaag

SEQ ID NO: 3591 - DNA, 21 bp, Artificial Sequence
  n-mer motif encoding polynucleotide
tctaaccgtacggaaatgcca

SEQ ID NO: 3592 - DNA, 21 bp, Artificial Sequence
  n-mer motif encoding polynucleotide
aacgtggtgaaaaacaacaca

SEQ ID NO: 3593 - DNA, 21 bp, Artificial Sequence
  n-mer motif encoding polynucleotide
gtggtcgactcaacatacccg

SEQ ID NO: 3594 - DNA, 21 bp, Artificial Sequence
  n-mer motif encoding polynucleotide
gtggctggggggacttcggag

SEQ ID NO: 3595 - DNA, 21 bp, Artificial Sequence
  n-mer motif encoding polynucleotide
cgggcagacatgactccctta

SEQ ID NO: 3596 - DNA, 21 bp, Artificial Sequence
  n-mer motif encoding polynucleotide
ggacacgaacaaactgacgca

SEQ ID NO: 3597 - DNA, 21 bp, Artificial Sequence
  n-mer motif encoding polynucleotide
agtgctttgattagtgtggtt

SEQ ID NO: 3598 - DNA, 21 bp, Artificial Sequence
  n-mer motif encoding polynucleotide
aactcgacaacggcacaatca

SEQ ID NO: 3599 - DNA, 21 bp, Artificial Sequence
  n-mer motif encoding polynucleotide
tacggcgacctaactacagtc

SEQ ID NO: 3600 - DNA, 21 bp, Artificial Sequence
  n-mer motif encoding polynucleotide
gcacgcaacgacggacaagga

SEQ ID NO: 3601 - DNA, 21 bp, Artificial Sequence
  n-mer motif encoding polynucleotide
ctgaacgttagttcatccaaa

SEQ ID NO: 3602 - DNA, 21 bp, Artificial Sequence
  n-mer motif encoding polynucleotide
tctggcgtctcgaaagaacgg

SEQ ID NO: 3603 - DNA, 21 bp, Artificial Sequence
  n-mer motif encoding polynucleotide
aacatggaacacaccatggcg

SEQ ID NO: 3604 - DNA, 21 bp, Artificial Sequence
  n-mer motif encoding polynucleotide
gctcgtccggcttcgtctgat

SEQ ID NO: 3605 - DNA, 21 bp, Artificial Sequence
  n-mer motif encoding polynucleotide
cttagggaagaatctgcacgt

SEQ ID NO: 3606 - DNA, 21 bp, Artificial Sequence
  n-mer motif encoding polynucleotide
ttggccaacatgtccgcacca

SEQ ID NO: 3607 - DNA, 21 bp, Artificial Sequence
  n-mer motif encoding polynucleotide
aaccacacggtagaaggacgc

SEQ ID NO: 3608 - DNA, 21 bp, Artificial Sequence
  n-mer motif encoding polynucleotide
cctcagcatcagcatgagcat

SEQ ID NO: 3609 - DNA, 21 bp, Artificial Sequence
  n-mer motif encoding polynucleotide
aattcttcggagctgaagacg

SEQ ID NO: 3610 - DNA, 21 bp, Artificial Sequence
  n-mer motif encoding polynucleotide
cttgttgctgagcgtttgccg

SEQ ID NO: 3611 - DNA, 21 bp, Artificial Sequence
  n-mer motif encoding polynucleotide
aacgttatgcactcttcctcc

SEQ ID NO: 3612 - DNA, 21 bp, Artificial Sequence
  n-mer motif encoding polynucleotide
gcgagtgataagggggcgaat

SEQ ID NO: 3613 - DNA, 21 bp, Artificial Sequence
  n-mer motif encoding polynucleotide
agtctggatcggaagcctccg

SEQ ID NO: 3614 - DNA, 21 bp, Artificial Sequence
  n-mer motif encoding polynucleotide
acagaacacgaaaaatccact

SEQ ID NO: 3615 - DNA, 21 bp, Artificial Sequence
  n-mer motif encoding polynucleotide
cctcataatcaggagatgggt

SEQ ID NO: 3616 - DNA, 21 bp, Artificial Sequence
  n-mer motif encoding polynucleotide
gagtctaagactgtggttatt

SEQ ID NO: 3617 - DNA, 21 bp, Artificial Sequence
  n-mer motif encoding polynucleotide
tcgacgggccaaaacttaaaa

SEQ ID NO: 3618 - DNA, 21 bp, Artificial Sequence
  n-mer motif encoding polynucleotide
gttcttcatgtttctgatgtt

SEQ ID NO: 3619 - DNA, 21 bp, Artificial Sequence
  n-mer motif encoding polynucleotide
cctgacgcagcgcgtagcccg

SEQ ID NO: 3620 - DNA, 21 bp, Artificial Sequence
  n-mer motif encoding polynucleotide
gctcctcggcatgctcatcct

SEQ ID NO: 3621 - DNA, 21 bp, Artificial Sequence
  n-mer motif encoding polynucleotide
catgtgaatcctacgccggcg

SEQ ID NO: 3622 - DNA, 21 bp, Artificial Sequence
  n-mer motif encoding polynucleotide
ttgcctaatgagcgtccgggt

SEQ ID NO: 3623 - DNA, 21 bp, Artificial Sequence
  n-mer motif encoding polynucleotide
gaggctaagggttttggtcat

SEQ ID NO: 3624 - DNA, 21 bp, Artificial Sequence
  n-mer motif encoding polynucleotide
tcagaaaacacctctgtaccc

SEQ ID NO: 3625 - DNA, 21 bp, Artificial Sequence
  n-mer motif encoding polynucleotide
ggtcccggagaaaactaccga

SEQ ID NO: 3626 - DNA, 21 bp, Artificial Sequence
  n-mer motif encoding polynucleotide
tctcatgagatgaataatggt

SEQ ID NO: 3627 - DNA, 21 bp, Artificial Sequence
  n-mer motif encoding polynucleotide
gtagacacctacagcggtctg

SEQ ID NO: 3628 - DNA, 21 bp, Artificial Sequence
  n-mer motif encoding polynucleotide
ggagtcctaggaaacatggta

SEQ ID NO: 3629 - DNA, 21 bp, Artificial Sequence
  n-mer motif encoding polynucleotide
gcgctggataatagtagtcgg

SEQ ID NO: 3630 - DNA, 21 bp, Artificial Sequence
  n-mer motif encoding polynucleotide
tttctgggttctagtaatcat

SEQ ID NO: 3631 - DNA, 21 bp, Artificial Sequence
  n-mer motif encoding polynucleotide
cctgtggttcatggtgagcct

SEQ ID NO: 3632 - DNA, 21 bp, Artificial Sequence
  n-mer motif encoding polynucleotide
cgcagggaaggtatcctaatg

SEQ ID NO: 3633 - DNA, 21 bp, Artificial Sequence
  n-mer motif encoding polynucleotide
cagcagggggcgcctacttct

SEQ ID NO: 3634 - DNA, 21 bp, Artificial Sequence
  n-mer motif encoding polynucleotide
aaggttagtggtggggagacg

SEQ ID NO: 3635 - DNA, 21 bp, Artificial Sequence
  n-mer motif encoding polynucleotide
gcgaaacacgaaagctcgtct

SEQ ID NO: 3636 - DNA, 21 bp, Artificial Sequence
  n-mer motif encoding polynucleotide
attcttatgggtgcgcgtact

SEQ ID NO: 3637 - DNA, 21 bp, Artificial Sequence
  n-mer motif encoding polynucleotide
acgctaggcagcagcagcacc

SEQ ID NO: 3638 - DNA, 21 bp, Artificial Sequence
  n-mer motif encoding polynucleotide
ctaagatctgaaccgacacaa

SEQ ID NO: 3639 - DNA, 21 bp, Artificial Sequence
  n-mer motif encoding polynucleotide
cgctcggaacaaaaaactccg

SEQ ID NO: 3640 - DNA, 21 bp, Artificial Sequence
  n-mer motif encoding polynucleotide
cacgctccaagcggcgccata

SEQ ID NO: 3641 - DNA, 21 bp, Artificial Sequence
  n-mer motif encoding polynucleotide
agtagtgttacttcgagggag

SEQ ID NO: 3642 - DNA, 21 bp, Artificial Sequence
  n-mer motif encoding polynucleotide
gtgaatccgcatcctgcgcag

SEQ ID NO: 3643 - DNA, 21 bp, Artificial Sequence
  n-mer motif encoding polynucleotide
caatactcgatggacacgcgc

SEQ ID NO: 3644 - DNA, 21 bp, Artificial Sequence
  n-mer motif encoding polynucleotide
actcctggtgttactaggacg

SEQ ID NO: 3645 - DNA, 21 bp, Artificial Sequence
  n-mer motif encoding polynucleotide
ctttatgaggttggtactcct

SEQ ID NO: 3646 - DNA, 21 bp, Artificial Sequence
  n-mer motif encoding polynucleotide
acgatgacgagtgagctttcg

SEQ ID NO: 3647 - DNA, 21 bp, Artificial Sequence
  n-mer motif encoding polynucleotide
tcaggttcggaataccgtacc

SEQ ID NO: 3648 - DNA, 21 bp, Artificial Sequence
  n-mer motif encoding polynucleotide
gaaatgcaaaccaaaaacgcc

SEQ ID NO: 3649 - DNA, 21 bp, Artificial Sequence
  n-mer motif encoding polynucleotide
ggccacgaaaacatgggcgtg

SEQ ID NO: 3650 - DNA, 21 bp, Artificial Sequence
  n-mer motif encoding polynucleotide
ggggcgcatacgtcggcttcg

SEQ ID NO: 3651 - DNA, 21 bp, Artificial Sequence
  n-mer motif encoding polynucleotide
gctgatacgctgctgcgtagg

SEQ ID NO: 3652 - DNA, 21 bp, Artificial Sequence
  n-mer motif encoding polynucleotide
gacaacagcaacaacgtccca

SEQ ID NO: 3653 - DNA, 21 bp, Artificial Sequence
  n-mer motif encoding polynucleotide
atgactgctaacttggtggaa

SEQ ID NO: 3654 - DNA, 21 bp, Artificial Sequence
  n-mer motif encoding polynucleotide
gaagcgggacgcacgcttcaa

SEQ ID NO: 3655 - DNA, 21 bp, Artificial Sequence
  n-mer motif encoding polynucleotide
agacacgtcgtccccgactcc

SEQ ID NO: 3656 - DNA, 21 bp, Artificial Sequence
  n-mer motif encoding polynucleotide
gtgagttctgagcagtatagg

SEQ ID NO: 3657 - DNA, 21 bp, Artificial Sequence
  n-mer motif encoding polynucleotide
ggtatcgaagcaagtcgcgga

SEQ ID NO: 3658 - DNA, 21 bp, Artificial Sequence
  n-mer motif encoding polynucleotide
agacaaggcgtgaacggagta

SEQ ID NO: 3659 - DNA, 21 bp, Artificial Sequence
  n-mer motif encoding polynucleotide
actgtgatgatgagtacgagg

SEQ ID NO: 3660 - DNA, 21 bp, Artificial Sequence
  n-mer motif encoding polynucleotide
tggcaagaccacaacaaagtc

SEQ ID NO: 3661 - DNA, 21 bp, Artificial Sequence
  n-mer motif encoding polynucleotide
ggaatcacaggatcaacagga

SEQ ID NO: 3662 - DNA, 21 bp, Artificial Sequence
  n-mer motif encoding polynucleotide
aattatgctcagagggatggt

SEQ ID NO: 3663 - DNA, 21 bp, Artificial Sequence
  n-mer motif encoding polynucleotide
aaacaagaagctctgtcctca

SEQ ID NO: 3664 - DNA, 21 bp, Artificial Sequence
  n-mer motif encoding polynucleotide
tcaactttagaccgaagcgaa

SEQ ID NO: 3665 - DNA, 21 bp, Artificial Sequence
  n-mer motif encoding polynucleotide
gcgattacgaatacgcagcag

SEQ ID NO: 3666 - DNA, 21 bp, Artificial Sequence
  n-mer motif encoding polynucleotide
aggctggcgactcagagtgct

SEQ ID NO: 3667 - DNA, 21 bp, Artificial Sequence
  n-mer motif encoding polynucleotide
tggcagcttacgacgagtcat

SEQ ID NO: 3668 - DNA, 21 bp, Artificial Sequence
  n-mer motif encoding polynucleotide
ggtggtagtggttctaatact

SEQ ID NO: 3669 - DNA, 21 bp, Artificial Sequence
  n-mer motif encoding polynucleotide
aacttagtagcgtacacgaaa

SEQ ID NO: 3670 - DNA, 21 bp, Artificial Sequence
  n-mer motif encoding polynucleotide
aaggcttcgcatgatactagt

SEQ ID NO: 3671 - DNA, 21 bp, Artificial Sequence
  n-mer motif encoding polynucleotide
gccataacgataataggcact

SEQ ID NO: 3672 - DNA, 21 bp, Artificial Sequence
  n-mer motif encoding polynucleotide
aacgcatcgtcggaccgcttc

SEQ ID NO: 3673 - DNA, 21 bp, Artificial Sequence
  n-mer motif encoding polynucleotide
gaaacgcaacgtatcgaactg

SEQ ID NO: 3674 - DNA, 21 bp, Artificial Sequence
  n-mer motif encoding polynucleotide
gtgattgaggttaattcgcgt

SEQ ID NO: 3675 - DNA, 21 bp, Artificial Sequence
  n-mer motif encoding polynucleotide
gatagggatatggagggtgtt

SEQ ID NO: 3676 - DNA, 21 bp, Artificial Sequence
  n-mer motif encoding polynucleotide
atttcggagatgacgcggtat

SEQ ID NO: 3677 - DNA, 21 bp, Artificial Sequence
  n-mer motif encoding polynucleotide
gagcatgatgtgagtacgcgt

SEQ ID NO: 3678 - DNA, 21 bp, Artificial Sequence
  n-mer motif encoding polynucleotide
cgtatggaggagactgcttat

SEQ ID NO: 3679 - DNA, 21 bp, Artificial Sequence
  n-mer motif encoding polynucleotide
tatagtactgatcttaggatg

SEQ ID NO: 3680 - DNA, 21 bp, Artificial Sequence
  n-mer motif encoding polynucleotide
gtgcctgagcctaagaaggcg

SEQ ID NO: 3681 - DNA, 21 bp, Artificial Sequence
  n-mer motif encoding polynucleotide
acttatgcgcctaggtcgcct

SEQ ID NO: 3682 - DNA, 21 bp, Artificial Sequence
  n-mer motif encoding polynucleotide
gctgcggcttcgcctttggct

SEQ ID NO: 3683 - DNA, 21 bp, Artificial Sequence
  n-mer motif encoding polynucleotide
agtgggacgtatgctagtcgt

SEQ ID NO: 3684 - DNA, 21 bp, Artificial Sequence
  n-mer motif encoding polynucleotide
actgaagcatcaatcgcggcg

SEQ ID NO: 3685 - DNA, 21 bp, Artificial Sequence
  n-mer motif encoding polynucleotide
cgcatcgtagacacgttggga

SEQ ID NO: 3686 - DNA, 21 bp, Artificial Sequence
  n-mer motif encoding polynucleotide
tatctgcaggagaagtttcct

SEQ ID NO: 3687 - DNA, 21 bp, Artificial Sequence
  n-mer motif encoding polynucleotide
gttcatgatcagggggctggg

SEQ ID NO: 3688 - DNA, 21 bp, Artificial Sequence
  n-mer motif encoding polynucleotide
ccccaagccactctcaacaac

SEQ ID NO: 3689 - DNA, 21 bp, Artificial Sequence
  n-mer motif encoding polynucleotide
tgcggaatgtccgaatgctcg

SEQ ID NO: 3690 - DNA, 21 bp, Artificial Sequence
  n-mer motif encoding polynucleotide
ggttcgcacaacgggccgaca

SEQ ID NO: 3691 - DNA, 21 bp, Artificial Sequence
  n-mer motif encoding polynucleotide
tttgggtctgggccgaatctt

SEQ ID NO: 3692 - DNA, 21 bp, Artificial Sequence
  n-mer motif encoding polynucleotide
atggatacgaatacgcatcgt

SEQ ID NO: 3693 - DNA, 21 bp, Artificial Sequence
  n-mer motif encoding polynucleotide
aagaataatcctgaggatggt

SEQ ID NO: 3694 - DNA, 21 bp, Artificial Sequence
  n-mer motif encoding polynucleotide
ctgcctacggctactggtcag

SEQ ID NO: 3695 - DNA, 21 bp, Artificial Sequence
  n-mer motif encoding polynucleotide
acggctgagcgtactgagtat

SEQ ID NO: 3696 - DNA, 21 bp, Artificial Sequence
  n-mer motif encoding polynucleotide
aactacagggacatcacaatg

SEQ ID NO: 3697 - DNA, 21 bp, Artificial Sequence
  n-mer motif encoding polynucleotide
cccgcgagaagcgacgccctt

SEQ ID NO: 3698 - DNA, 21 bp, Artificial Sequence
  n-mer motif encoding polynucleotide
tccgttgtaactcttggggtg

SEQ ID NO: 3699 - DNA, 21 bp, Artificial Sequence
  n-mer motif encoding polynucleotide
gttgttaaggagattaagctg

SEQ ID NO: 3700 - DNA, 21 bp, Artificial Sequence
  n-mer motif encoding polynucleotide
gaccactcgaaacaaaactct

SEQ ID NO: 3701 - DNA, 21 bp, Artificial Sequence
  n-mer motif encoding polynucleotide
cagtctaatttggttattaat

SEQ ID NO: 3702 - DNA, 21 bp, Artificial Sequence
  n-mer motif encoding polynucleotide
attccggttggggcgatggct

SEQ ID NO: 3703 - DNA, 21 bp, Artificial Sequence
  n-mer motif encoding polynucleotide
acgtcggagatgcgtactgct

SEQ ID NO: 3704 - DNA, 21 bp, Artificial Sequence
  n-mer motif encoding polynucleotide
ggtagtcagcgtgctatgaat

SEQ ID NO: 3705 - DNA, 21 bp, Artificial Sequence
  n-mer motif encoding polynucleotide
cacctgtcacaagcaaaccac

SEQ ID NO: 3706 - DNA, 21 bp, Artificial Sequence
  n-mer motif encoding polynucleotide
ggagggaactcccacggggta

SEQ ID NO: 3707 - DNA, 21 bp, Artificial Sequence
  n-mer motif encoding polynucleotide
gtgactcgtagtacgaaggag

SEQ ID NO: 3708 - DNA, 21 bp, Artificial Sequence
  n-mer motif encoding polynucleotide
atgctcagagcaagcaccgcc

SEQ ID NO: 3709 - DNA, 21 bp, Artificial Sequence
  n-mer motif encoding polynucleotide
ggcaggcaaataccagaacaa

SEQ ID NO: 3710 - DNA, 21 bp, Artificial Sequence
  n-mer motif encoding polynucleotide
tggaatcagaatgtgtctcat

SEQ ID NO: 3711 - DNA, 21 bp, Artificial Sequence
  n-mer motif encoding polynucleotide
cagcggggggagcttcctgcg

SEQ ID NO: 3712 - DNA, 21 bp, Artificial Sequence
  n-mer motif encoding polynucleotide
gcgaatgatagtttgcgttct

SEQ ID NO: 3713 - DNA, 21 bp, Artificial Sequence
  n-mer motif encoding polynucleotide
aacatgccaccggaatcgcac

SEQ ID NO: 3714 - DNA, 21 bp, Artificial Sequence
  n-mer motif encoding polynucleotide
aatttgagtcttcagagtctg

SEQ ID NO: 3715 - DNA, 21 bp, Artificial Sequence
  n-mer motif encoding polynucleotide
acatcagacggtctactaagt

SEQ ID NO: 3716 - DNA, 21 bp, Artificial Sequence
  n-mer motif encoding polynucleotide
gcgggccaagcgtaccaatcc

SEQ ID NO: 3717 - DNA, 21 bp, Artificial Sequence
  n-mer motif encoding polynucleotide
ctgagtgtgaaggaggagatt

SEQ ID NO: 3718 - DNA, 21 bp, Artificial Sequence
  n-mer motif encoding polynucleotide
gataatagtcctgctaatcat

SEQ ID NO: 3719 - DNA, 21 bp, Artificial Sequence
  n-mer motif encoding polynucleotide
atgcacaacctaccctcatac

SEQ ID NO: 3720 - DNA, 21 bp, Artificial Sequence
  n-mer motif encoding polynucleotide
taccaagcctcaaacaacagt

SEQ ID NO: 3721 - DNA, 21 bp, Artificial Sequence
  n-mer motif encoding polynucleotide
gcgcgggcagaaggggtcttc

SEQ ID NO: 3722 - DNA, 21 bp, Artificial Sequence
  n-mer motif encoding polynucleotide
ggccgagaaggaaacctacca

SEQ ID NO: 3723 - DNA, 21 bp, Artificial Sequence
  n-mer motif encoding polynucleotide
caagctgcagaaagggacaga

SEQ ID NO: 3724 - DNA, 21 bp, Artificial Sequence
  n-mer motif encoding polynucleotide
gttgagaataatcgtatgagt

SEQ ID NO: 3725 - DNA, 21 bp, Artificial Sequence
  n-mer motif encoding polynucleotide
aatatgtcgcatagtactctg

SEQ ID NO: 3726 - DNA, 21 bp, Artificial Sequence
  n-mer motif encoding polynucleotide
tcttcgttgggtcttgctccg

SEQ ID NO: 3727 - DNA, 21 bp, Artificial Sequence
  n-mer motif encoding polynucleotide
aacgtcgctccctacagtagc

SEQ ID NO: 3728 - DNA, 21 bp, Artificial Sequence
  n-mer motif encoding polynucleotide
aggcctgcgcagctgcctgag

SEQ ID NO: 3729 - DNA, 21 bp, Artificial Sequence
  n-mer motif encoding polynucleotide
atgtcgggttctgggaacgca

SEQ ID NO: 3730 - DNA, 21 bp, Artificial Sequence
  n-mer motif encoding polynucleotide
cacgggggggaacaccggaac

SEQ ID NO: 3731 - DNA, 21 bp, Artificial Sequence
  n-mer motif encoding polynucleotide
gcatccggcgcacgctacgtc

SEQ ID NO: 3732 - DNA, 21 bp, Artificial Sequence
  n-mer motif encoding polynucleotide
caaaaccacgcgtctggtgaa

SEQ ID NO: 3733 - DNA, 21 bp, Artificial Sequence
  n-mer motif encoding polynucleotide
gcacaccaaaaagacctacgc

SEQ ID NO: 3734 - DNA, 21 bp, Artificial Sequence
  n-mer motif encoding polynucleotide
tttgggaaggttggtactgct

SEQ ID NO: 3735 - DNA, 21 bp, Artificial Sequence
  n-mer motif encoding polynucleotide
ctgcagaagtcgactctggct

SEQ ID NO: 3736 - DNA, 21 bp, Artificial Sequence
  n-mer motif encoding polynucleotide
attcataatgagtcttatggt

SEQ ID NO: 3737 - protein, 7 aa, Artificial Sequence
  n-mer motif
RGDLTTP

SEQ ID NO: 3738 - protein, 7 aa, Artificial Sequence
  n-mer motif
RGDLNQY

SEQ ID NO: 3739 - protein, 7 aa, Artificial Sequence
  n-mer motif
RGDLSTP

SEQ ID NO: 3740 - protein, 7 aa, Artificial Sequence
  n-mer motif
RGDQLYH

SEQ ID NO: 3741 - protein, 7 aa, Artificial Sequence
  n-mer motif
RGDTMSK

SEQ ID NO: 3742 - protein, 7 aa, Artificial Sequence
  n-mer motif
RGDATEL

SEQ ID NO: 3743 - protein, 7 aa, Artificial Sequence
  n-mer motif
RGDLSTP

SEQ ID NO: 3744 - protein, 7 aa, Artificial Sequence
  n-mer motif
RGDMINT

SEQ ID NO: 3745 - protein, 7 aa, Artificial Sequence
  n-mer motif
RGDLNQY

SEQ ID NO: 3746 - protein, 7 aa, Artificial Sequence
  n-mer motif
RGDTMSK

SEQ ID NO: 3747 - protein, 7 aa, Artificial Sequence
  n-mer motif
RGDLTTP

SEQ ID NO: 3748 - protein, 7 aa, Artificial Sequence
  n-mer motif
RGDLNDS

SEQ ID NO: 3749 - protein, 7 aa, Artificial Sequence
  n-mer motif
ANPNILD

SEQ ID NO: 3750 - protein, 7 aa, Artificial Sequence
  n-mer motif
RGDTMNY

SEQ ID NO: 3751 - protein, 7 aa, Artificial Sequence
  n-mer motif
MSNLGYE

SEQ ID NO: 3752 - protein, 7 aa, Artificial Sequence
  n-mer motif
YTSQTST

SEQ ID NO: 3753 - protein, 7 aa, Artificial Sequence
  n-mer motif
LGGNSRF

SEQ ID NO: 3754 - protein, 7 aa, Artificial Sequence
  n-mer motif
QSQAIQL

SEQ ID NO: 3755 - protein, 7 aa, Artificial Sequence
  n-mer motif
NTYTPGK

SEQ ID NO: 3756 - protein, 7 aa, Artificial Sequence
  n-mer motif
GAEAGRQ

SEQ ID NO: 3757 - protein, 7 aa, Artificial Sequence
  n-mer motif
EHATAKQ

SEQ ID NO: 3758 - protein, 7 aa, Artificial Sequence
  n-mer motif
AAQLVSP

SEQ ID NO: 3759 - protein, 7 aa, Artificial Sequence
  n-mer motif
DQTASIV

SEQ ID NO: 3760 - protein, 7 aa, Artificial Sequence
  n-mer motif
VQTHIGV

SEQ ID NO: 3761 - protein, 7 aa, Artificial Sequence
  n-mer motif
SYGNTHD

SEQ ID NO: 3762 - protein, 7 aa, Artificial Sequence
  n-mer motif
TSTASKQ

SEQ ID NO: 3763 - protein, 7 aa, Artificial Sequence
  n-mer motif
LVTHERI

SEQ ID NO: 3764 - protein, 7 aa, Artificial Sequence
  n-mer motif
MDKSNNS

SEQ ID NO: 3765 - protein, 7 aa, Artificial Sequence
  n-mer motif
RGDMSRE

SEQ ID NO: 3766 - protein, 7 aa, Artificial Sequence
  n-mer motif
RGDVAEI

SEQ ID NO: 3767 - protein, 7 aa, Artificial Sequence
  n-mer motif
GGENRTP

SEQ ID NO: 3768 - protein, 7 aa, Artificial Sequence
  n-mer motif
AGHQQLA

SEQ ID NO: 3769 - protein, 7 aa, Artificial Sequence
  n-mer motif
RLNSSMN

SEQ ID NO: 3770 - protein, 7 aa, Artificial Sequence
  n-mer motif
YYEKLSA

SEQ ID NO: 3771 - protein, 7 aa, Artificial Sequence
  n-mer motif
EASNYER

SEQ ID NO: 3772 - protein, 7 aa, Artificial Sequence
  n-mer motif
FQTDTHR

SEQ ID NO: 3773 - protein, 7 aa, Artificial Sequence
  n-mer motif
NSSQWPN

SEQ ID NO: 3774 - protein, 7 aa, Artificial Sequence
  n-mer motif
DGKTTSN

SEQ ID NO: 3775 - protein, 7 aa, Artificial Sequence
  n-mer motif
AVHATSS

SEQ ID NO: 3776 - protein, 7 aa, Artificial Sequence
  n-mer motif
KTLPGRE

SEQ ID NO: 3777 - protein, 7 aa, Artificial Sequence
  n-mer motif
ILKSDAP

SEQ ID NO: 3778 - protein, 7 aa, Artificial Sequence
  n-mer motif
STNEAPK

SEQ ID NO: 3779 - protein, 7 aa, Artificial Sequence
  n-mer motif
FDSANGR

SEQ ID NO: 3780 - protein, 7 aa, Artificial Sequence
  n-mer motif
MDAAYGS

SEQ ID NO: 3781 - protein, 7 aa, Artificial Sequence
  n-mer motif
NKDHNHL

SEQ ID NO: 3782 - protein, 7 aa, Artificial Sequence
  n-mer motif
GQYSQTL

SEQ ID NO: 3783 - protein, 7 aa, Artificial Sequence
  n-mer motif
EAFPRAG

SEQ ID NO: 3784 - protein, 7 aa, Artificial Sequence
  n-mer motif
EHTHLNP

SEQ ID NO: 3785 - protein, 7 aa, Artificial Sequence
  n-mer motif
MQREDAN

SEQ ID NO: 3786 - protein, 7 aa, Artificial Sequence
  n-mer motif
LTGSDMK

SEQ ID NO: 3787 - protein, 7 aa, Artificial Sequence
  n-mer motif
RVNNDAI

SEQ ID NO: 3788 - protein, 7 aa, Artificial Sequence
  n-mer motif
RGDQGTH

SEQ ID NO: 3789 - protein, 7 aa, Artificial Sequence
  n-mer motif
INISSDF

SEQ ID NO: 3790 - protein, 7 aa, Artificial Sequence
  n-mer motif
NNDNGFV

SEQ ID NO: 3791 - protein, 7 aa, Artificial Sequence
  n-mer motif
FIANTNP

SEQ ID NO: 3792 - protein, 7 aa, Artificial Sequence
  n-mer motif
GLHGTNA

SEQ ID NO: 3793 - protein, 7 aa, Artificial Sequence
  n-mer motif
KTIDIAQ

SEQ ID NO: 3794 - protein, 7 aa, Artificial Sequence
  n-mer motif
SSDSRIP

SEQ ID NO: 3795 - protein, 7 aa, Artificial Sequence
  n-mer motif
STSPVNS

SEQ ID NO: 3796 - protein, 7 aa, Artificial Sequence
  n-mer motif
ASMPSVD

SEQ ID NO: 3797 - protein, 7 aa, Artificial Sequence
  n-mer motif
GHNMAQA

SEQ ID NO: 3798 - protein, 7 aa, Artificial Sequence
  n-mer motif
HNKPNGD

SEQ ID NO: 3799 - protein, 7 aa, Artificial Sequence
  n-mer motif
YRMETNP

SEQ ID NO: 3800 - protein, 7 aa, Artificial Sequence
  n-mer motif
LGNVVHP

SEQ ID NO: 3801 - protein, 7 aa, Artificial Sequence
  n-mer motif
VTAHQLS

SEQ ID NO: 3802 - protein, 7 aa, Artificial Sequence
  n-mer motif
TMVEVLP

SEQ ID NO: 3803 - protein, 7 aa, Artificial Sequence
  n-mer motif
IKGSGSQ

SEQ ID NO: 3804 - protein, 7 aa, Artificial Sequence
  n-mer motif
TNGGSLN

SEQ ID NO: 3805 - protein, 7 aa, Artificial Sequence
  n-mer motif
LGGNSRI

SEQ ID NO: 3806 - protein, 7 aa, Artificial Sequence
  n-mer motif
RGDAANK

SEQ ID NO: 3807 - protein, 7 aa, Artificial Sequence
  n-mer motif
ALNAQGI

SEQ ID NO: 3808 - protein, 7 aa, Artificial Sequence
  n-mer motif
AEHATSS

SEQ ID NO: 3809 - protein, 7 aa, Artificial Sequence
  n-mer motif
YLTTGTA

SEQ ID NO: 3810 - protein, 7 aa, Artificial Sequence
  n-mer motif
AEAQTRV

SEQ ID NO: 3811 - protein, 7 aa, Artificial Sequence
  n-mer motif
AEQGLSS

SEQ ID NO: 3812 - protein, 7 aa, Artificial Sequence
  n-mer motif
LIVTQHV

SEQ ID NO: 3813 - protein, 7 aa, Artificial Sequence
  n-mer motif
SSYQSGL

SEQ ID NO: 3814 - protein, 7 aa, Artificial Sequence
  n-mer motif
ATVYNEL

SEQ ID NO: 3815 - protein, 7 aa, Artificial Sequence
  n-mer motif
HDTVGER

SEQ ID NO: 3816 - protein, 7 aa, Artificial Sequence
  n-mer motif
RGDLNDS

SEQ ID NO: 3817 - protein, 7 aa, Artificial Sequence
  n-mer motif
HDISLDR

SEQ ID NO: 3818 - protein, 7 aa, Artificial Sequence
  n-mer motif
TEQSYSR

SEQ ID NO: 3819 - protein, 6 aa, Artificial Sequence
  n-mer motif
WGAEFA

SEQ ID NO: 3820 - protein, 7 aa, Artificial Sequence
  n-mer motif
AVHATSR

SEQ ID NO: 3821 - protein, 7 aa, Artificial Sequence
  n-mer motif
IESKTVQ

SEQ ID NO: 3822 - protein, 7 aa, Artificial Sequence
  n-mer motif
TNVSTLL

SEQ ID NO: 3823 - protein, 7 aa, Artificial Sequence
  n-mer motif
PPNGSSR

SEQ ID NO: 3824 - protein, 7 aa, Artificial Sequence
  n-mer motif
PSTHGYV

SEQ ID NO: 3825 - protein, 7 aa, Artificial Sequence
  n-mer motif
TAASTAR

SEQ ID NO: 3826 - protein, 7 aa, Artificial Sequence
  n-mer motif
YNAGGEQ

SEQ ID NO: 3827 - protein, 7 aa, Artificial Sequence
  n-mer motif
THNQREL

SEQ ID NO: 3828 - protein, 7 aa, Artificial Sequence
  n-mer motif
TFTVDGR

SEQ ID NO: 3829 - protein, 7 aa, Artificial Sequence
  n-mer motif
HSSPGSS

SEQ ID NO: 3830 - protein, 7 aa, Artificial Sequence
  n-mer motif
STSGYNT

SEQ ID NO: 3831 - protein, 7 aa, Artificial Sequence
  n-mer motif
SEKLTDK

SEQ ID NO: 3832 - protein, 7 aa, Artificial Sequence
  n-mer motif
GRNTSNL

SEQ ID NO: 3833 - protein, 7 aa, Artificial Sequence
  n-mer motif
TGTAISR

SEQ ID NO: 3834 - protein, 7 aa, Artificial Sequence
  n-mer motif
SMQDPSL

SEQ ID NO: 3835 - protein, 7 aa, Artificial Sequence
  n-mer motif
TRSDIGV

SEQ ID NO: 3836 - protein, 7 aa, Artificial Sequence
  n-mer motif
TQNHQLS

SEQ ID NO: 3837 - protein, 7 aa, Artificial Sequence
  n-mer motif
FVDNRQP

SEQ ID NO: 3838 - protein, 7 aa, Artificial Sequence
  n-mer motif
SLNSSST

SEQ ID NO: 3839 - protein, 7 aa, Artificial Sequence
  n-mer motif
KAVSEII

SEQ ID NO: 3840 - protein, 7 aa, Artificial Sequence
  n-mer motif
GTSDNYR

SEQ ID NO: 3841 - protein, 7 aa, Artificial Sequence
  n-mer motif
MSSHTVQ

SEQ ID NO: 3842 - protein, 7 aa, Artificial Sequence
  n-mer motif
SITHSNT

SEQ ID NO: 3843 - protein, 7 aa, Artificial Sequence
  n-mer motif
VQTSTGA

SEQ ID NO: 3844 - protein, 7 aa, Artificial Sequence
  n-mer motif
RGDMTRA

SEQ ID NO: 3845 - protein, 7 aa, Artificial Sequence
  n-mer motif
IGLQNST

SEQ ID NO: 3846 - protein, 7 aa, Artificial Sequence
  n-mer motif
SADRDNK

SEQ ID NO: 3847 - protein, 7 aa, Artificial Sequence
  n-mer motif
YSQSIKN

SEQ ID NO: 3848 - protein, 7 aa, Artificial Sequence
  n-mer motif
RSLDSGM

SEQ ID NO: 3849 - protein, 7 aa, Artificial Sequence
  n-mer motif
AVPQSLP

SEQ ID NO: 3850 - protein, 7 aa, Artificial Sequence
  n-mer motif
ANDSIKL

SEQ ID NO: 3851 - protein, 7 aa, Artificial Sequence
  n-mer motif
NGNIYPS

SEQ ID NO: 3852 - protein, 7 aa, Artificial Sequence
  n-mer motif
GQTNAVH

SEQ ID NO: 3853 - protein, 7 aa, Artificial Sequence
  n-mer motif
QGDLRGS

SEQ ID NO: 3854 - protein, 7 aa, Artificial Sequence
  n-mer motif
VKASAGV

SEQ ID NO: 3855 - protein, 7 aa, Artificial Sequence
  n-mer motif
IASTWNM

SEQ ID NO: 3856 - protein, 7 aa, Artificial Sequence
  n-mer motif
NSAESSR

SEQ ID NO: 3857 - protein, 7 aa, Artificial Sequence
  n-mer motif
VFTGQTE

SEQ ID NO: 3858 - protein, 7 aa, Artificial Sequence
  n-mer motif
FGTSYTT

SEQ ID NO: 3859 - protein, 7 aa, Artificial Sequence
  n-mer motif
AVNETRL

SEQ ID NO: 3860 - protein, 7 aa, Artificial Sequence
  n-mer motif
GRTDTPN

SEQ ID NO: 3861 - protein, 7 aa, Artificial Sequence
  n-mer motif
NDRPLAS

SEQ ID NO: 3862 - protein, 7 aa, Artificial Sequence
  n-mer motif
AYQLTPA

SEQ ID NO: 3863 - protein, 7 aa, Artificial Sequence
  n-mer motif
MGEMGNI

SEQ ID NO: 3864 - protein, 7 aa, Artificial Sequence
  n-mer motif
ADMQHTV

SEQ ID NO: 3865 - protein, 7 aa, Artificial Sequence
  n-mer motif
AVVLNSN

SEQ ID NO: 3866 - protein, 7 aa, Artificial Sequence
  n-mer motif
FRDGQGM

SEQ ID NO: 3867 - protein, 7 aa, Artificial Sequence
  n-mer motif
KSTSNIE

SEQ ID NO: 3868 - protein, 7 aa, Artificial Sequence
  n-mer motif
TQAFSLG

SEQ ID NO: 3869 - protein, 7 aa, Artificial Sequence
  n-mer motif
WSRTGNT

SEQ ID NO: 3870 - protein, 7 aa, Artificial Sequence
  n-mer motif
STNTEPR

SEQ ID NO: 3871 - protein, 7 aa, Artificial Sequence
  n-mer motif
ENSDLSY

SEQ ID NO: 3872 - protein, 7 aa, Artificial Sequence
  n-mer motif
IDERSSI

SEQ ID NO: 3873 - protein, 7 aa, Artificial Sequence
  n-mer motif
DVHSSIP

SEQ ID NO: 3874 - protein, 7 aa, Artificial Sequence
  n-mer motif
ISGSTTH

SEQ ID NO: 3875 - protein, 7 aa, Artificial Sequence
  n-mer motif
WQTQVTT

SEQ ID NO: 3876 - protein, 7 aa, Artificial Sequence
  n-mer motif
NMGPMGR

SEQ ID NO: 3877 - protein, 7 aa, Artificial Sequence
  n-mer motif
VTQSSTL

SEQ ID NO: 3878 - protein, 7 aa, Artificial Sequence
  n-mer motif
IDRSASL

SEQ ID NO: 3879 - protein, 7 aa, Artificial Sequence
  n-mer motif
SHSITGL

SEQ ID NO: 3880 - protein, 7 aa, Artificial Sequence
  n-mer motif
KAGQLVE

SEQ ID NO: 3881 - protein, 7 aa, Artificial Sequence
  n-mer motif
SGVSEGN

SEQ ID NO: 3882 - protein, 7 aa, Artificial Sequence
  n-mer motif
TLTLSTL

SEQ ID NO: 3883 - protein, 7 aa, Artificial Sequence
  n-mer motif
AHNKHES

SEQ ID NO: 3884 - protein, 7 aa, Artificial Sequence
  n-mer motif
HNNNLQN

SEQ ID NO: 3885 - protein, 7 aa, Artificial Sequence
  n-mer motif
YNESSNA

SEQ ID NO: 3886 - protein, 7 aa, Artificial Sequence
  n-mer motif
REQAAER

SEQ ID NO: 3887 - protein, 7 aa, Artificial Sequence
  n-mer motif
TQYGTLP

SEQ ID NO: 3888 - protein, 7 aa, Artificial Sequence
  n-mer motif
HPGNSSV

SEQ ID NO: 3889 - protein, 7 aa, Artificial Sequence
  n-mer motif
SSREVSP

SEQ ID NO: 3890 - protein, 7 aa, Artificial Sequence
  n-mer motif
ANSTSQW

SEQ ID NO: 3891 - protein, 7 aa, Artificial Sequence
  n-mer motif
RDMINSS

SEQ ID NO: 3892 - protein, 7 aa, Artificial Sequence
  n-mer motif
ALPSGAR

SEQ ID NO: 3893 - protein, 7 aa, Artificial Sequence
  n-mer motif
PGTSGSR

SEQ ID NO: 3894 - protein, 7 aa, Artificial Sequence
  n-mer motif
WNGNATQ

SEQ ID NO: 3895 - protein, 7 aa, Artificial Sequence
  n-mer motif
GKATLVL

SEQ ID NO: 3896 - protein, 7 aa, Artificial Sequence
  n-mer motif
YTNGGHL

SEQ ID NO: 3897 - protein, 7 aa, Artificial Sequence
  n-mer motif
SQYNGTQ

SEQ ID NO: 3898 - protein, 7 aa, Artificial Sequence
  n-mer motif
YSSESAY

SEQ ID NO: 3899 - protein, 7 aa, Artificial Sequence
  n-mer motif
VKAGVAD

SEQ ID NO: 3900 - protein, 7 aa, Artificial Sequence
  n-mer motif
TMGTVQI

SEQ ID NO: 3901 - protein, 7 aa, Artificial Sequence
  n-mer motif
GVAGAVV

SEQ ID NO: 3902 - protein, 7 aa, Artificial Sequence
  n-mer motif
YDKTLSV

SEQ ID NO: 3903 - protein, 7 aa, Artificial Sequence
  n-mer motif
HGSAYSQ

SEQ ID NO: 3904 - protein, 7 aa, Artificial Sequence
  n-mer motif
TANIMSK

SEQ ID NO: 3905 - protein, 7 aa, Artificial Sequence
  n-mer motif
FSRETLA

SEQ ID NO: 3906 - protein, 7 aa, Artificial Sequence
  n-mer motif
LSGAGSQ

SEQ ID NO: 3907 - protein, 7 aa, Artificial Sequence
  n-mer motif
SNANQMS

SEQ ID NO: 3908 - protein, 7 aa, Artificial Sequence
  n-mer motif
SVLSPSN

SEQ ID NO: 3909 - protein, 7 aa, Artificial Sequence
  n-mer motif
DNVHGQV

SEQ ID NO: 3910 - protein, 7 aa, Artificial Sequence
  n-mer motif
DGREYAS

SEQ ID NO: 3911 - protein, 7 aa, Artificial Sequence
  n-mer motif
ISNQIKM

SEQ ID NO: 3912 - protein, 7 aa, Artificial Sequence
  n-mer motif
GRDNQHV

SEQ ID NO: 3913 - protein, 7 aa, Artificial Sequence
  n-mer motif
RNHETGA

SEQ ID NO: 3914 - protein, 7 aa, Artificial Sequence
  n-mer motif
SGSGANI

SEQ ID NO: 3915 - protein, 7 aa, Artificial Sequence
  n-mer motif
SMSDGLR

SEQ ID NO: 3916 - protein, 7 aa, Artificial Sequence
  n-mer motif
KESSAME

SEQ ID NO: 3917 - protein, 7 aa, Artificial Sequence
  n-mer motif
ANASTSL

SEQ ID NO: 3918 - protein, 7 aa, Artificial Sequence
  n-mer motif
SASGYLV

SEQ ID NO: 3919 - protein, 7 aa, Artificial Sequence
  n-mer motif
DTTQKPH

SEQ ID NO: 3920 - protein, 7 aa, Artificial Sequence
  n-mer motif
LIRGSME

SEQ ID NO: 3921 - protein, 7 aa, Artificial Sequence
  n-mer motif
DRTYSNT

SEQ ID NO: 3922 - protein, 7 aa, Artificial Sequence
  n-mer motif
ALGHQGN

SEQ ID NO: 3923 - protein, 7 aa, Artificial Sequence
  n-mer motif
ANHTSQE

SEQ ID NO: 3924 - protein, 7 aa, Artificial Sequence
  n-mer motif
ERGLNTN

SEQ ID NO: 3925 - protein, 7 aa, Artificial Sequence
  n-mer motif
TVGGNHH

SEQ ID NO: 3926 - protein, 7 aa, Artificial Sequence
  n-mer motif
PSDRTTY

SEQ ID NO: 3927 - protein, 7 aa, Artificial Sequence
  n-mer motif
SRQENFS

SEQ ID NO: 3928 - protein, 7 aa, Artificial Sequence
  n-mer motif
NKTTMEF

SEQ ID NO: 3929 - protein, 7 aa, Artificial Sequence
  n-mer motif
KHTENGT

SEQ ID NO: 3930 - protein, 7 aa, Artificial Sequence
  n-mer motif
ETGAMTS

SEQ ID NO: 3931 - protein, 7 aa, Artificial Sequence
  n-mer motif
GHRDSGG

SEQ ID NO: 3932 - protein, 7 aa, Artificial Sequence
  n-mer motif
RNAEGGL

SEQ ID NO: 3933 - protein, 7 aa, Artificial Sequence
  n-mer motif
GQRTTND

SEQ ID NO: 3934 - protein, 7 aa, Artificial Sequence
  n-mer motif
YNDALRP

SEQ ID NO: 3935 - protein, 7 aa, Artificial Sequence
  n-mer motif
GYATTVQ

SEQ ID NO: 3936 - protein, 7 aa, Artificial Sequence
  n-mer motif
IGGGIGN

SEQ ID NO: 3937 - protein, 7 aa, Artificial Sequence
  n-mer motif
VAVSNTP

SEQ ID NO: 3938 - protein, 7 aa, Artificial Sequence
  n-mer motif
LANGMTA

SEQ ID NO: 3939 - protein, 7 aa, Artificial Sequence
  n-mer motif
ISGSSSL

SEQ ID NO: 3940 - protein, 7 aa, Artificial Sequence
  n-mer motif
SNVHVVN

SEQ ID NO: 3941 - protein, 7 aa, Artificial Sequence
  n-mer motif
VETSRLY

SEQ ID NO: 3942 - protein, 7 aa, Artificial Sequence
  n-mer motif
SNADILA

SEQ ID NO: 3943 - protein, 7 aa, Artificial Sequence
  n-mer motif
NNVNPYS

SEQ ID NO: 3944 - protein, 7 aa, Artificial Sequence
  n-mer motif
ISVGVSV

SEQ ID NO: 3945 - protein, 7 aa, Artificial Sequence
  n-mer motif
SANNIAP

SEQ ID NO: 3946 - protein, 7 aa, Artificial Sequence
  n-mer motif
GVQMTAG

SEQ ID NO: 3947 - protein, 7 aa, Artificial Sequence
  n-mer motif
RYIANQT

SEQ ID NO: 3948 - protein, 7 aa, Artificial Sequence
  n-mer motif
TTESLHL

SEQ ID NO: 3949 - protein, 7 aa, Artificial Sequence
  n-mer motif
GYQDKTR

SEQ ID NO: 3950 - protein, 7 aa, Artificial Sequence
  n-mer motif
ASRPAAQ

SEQ ID NO: 3951 - protein, 7 aa, Artificial Sequence
  n-mer motif
SIQELLR

SEQ ID NO: 3952 - protein, 7 aa, Artificial Sequence
  n-mer motif
TVRSPQQ

SEQ ID NO: 3953 - protein, 7 aa, Artificial Sequence
  n-mer motif
AVLGGSN

SEQ ID NO: 3954 - protein, 7 aa, Artificial Sequence
  n-mer motif
MSTVLRE

SEQ ID NO: 3955 - protein, 7 aa, Artificial Sequence
  n-mer motif
TYGITHD

SEQ ID NO: 3956 - protein, 7 aa, Artificial Sequence
  n-mer motif
DANAGTR

SEQ ID NO: 3957 - protein, 7 aa, Artificial Sequence
  n-mer motif
FNGYVMA

SEQ ID NO: 3958 - protein, 7 aa, Artificial Sequence
  n-mer motif
INNFNTL

SEQ ID NO: 3959 - protein, 7 aa, Artificial Sequence
  n-mer motif
VANERLP

SEQ ID NO: 3960 - protein, 7 aa, Artificial Sequence
  n-mer motif
TNSNQGS

SEQ ID NO: 3961 - protein, 7 aa, Artificial Sequence
  n-mer motif
ATLNNSY

SEQ ID NO: 3962 - protein, 7 aa, Artificial Sequence
  n-mer motif
KNAQIDL

SEQ ID NO: 3963 - protein, 7 aa, Artificial Sequence
  n-mer motif
PATLHLT

SEQ ID NO: 3964 - protein, 7 aa, Artificial Sequence
  n-mer motif
LGSSTVS

SEQ ID NO: 3965 - protein, 7 aa, Artificial Sequence
  n-mer motif
NWNSEGT

SEQ ID NO: 3966 - protein, 7 aa, Artificial Sequence
  n-mer motif
PTNNLSM

SEQ ID NO: 3967 - protein, 7 aa, Artificial Sequence
  n-mer motif
ALKPNST

SEQ ID NO: 3968 - protein, 7 aa, Artificial Sequence
  n-mer motif
MVNSENT

SEQ ID NO: 3969 - protein, 7 aa, Artificial Sequence
  n-mer motif
SMDARLT

SEQ ID NO: 3970 - protein, 7 aa, Artificial Sequence
  n-mer motif
NNVVRDD

SEQ ID NO: 3971 - protein, 7 aa, Artificial Sequence
  n-mer motif
TRDQRST

SEQ ID NO: 3972 - protein, 7 aa, Artificial Sequence
  n-mer motif
ADIRNDK

SEQ ID NO: 3973 - protein, 7 aa, Artificial Sequence
  n-mer motif
MRDKINP

SEQ ID NO: 3974 - protein, 7 aa, Artificial Sequence
  n-mer motif
PTPNEHM

SEQ ID NO: 3975 - protein, 7 aa, Artificial Sequence
  n-mer motif
GYSHNSD

SEQ ID NO: 3976 - protein, 7 aa, Artificial Sequence
  n-mer motif
LRDGIAS

SEQ ID NO: 3977 - protein, 7 aa, Artificial Sequence
  n-mer motif
MNQMGGL

SEQ ID NO: 3978 - protein, 7 aa, Artificial Sequence
  n-mer motif
SSPTKGT

SEQ ID NO: 3979 - protein, 7 aa, Artificial Sequence
  n-mer motif
YLDNPLT

SEQ ID NO: 3980 - protein, 7 aa, Artificial Sequence
  n-mer motif
VMQRSAQ

SEQ ID NO: 3981 - protein, 7 aa, Artificial Sequence
  n-mer motif
SLQLTAG

SEQ ID NO: 3982 - protein, 7 aa, Artificial Sequence
  n-mer motif
VGSGGYN

SEQ ID NO: 3983 - protein, 7 aa, Artificial Sequence
  n-mer motif
DRPNNVS

SEQ ID NO: 3984 - protein, 7 aa, Artificial Sequence
  n-mer motif
LTEKASI

SEQ ID NO: 3985 - protein, 7 aa, Artificial Sequence
  n-mer motif
TTKTTSM

SEQ ID NO: 3986 - protein, 7 aa, Artificial Sequence
  n-mer motif
RLDLQVH

SEQ ID NO: 3987 - protein, 7 aa, Artificial Sequence
  n-mer motif
THVIGAV

SEQ ID NO: 3988 - protein, 7 aa, Artificial Sequence
  n-mer motif
TLTHLNP

SEQ ID NO: 3989 - protein, 7 aa, Artificial Sequence
  n-mer motif
TSISSQS

SEQ ID NO: 3990 - protein, 7 aa, Artificial Sequence
  n-mer motif
YHTHQVA

SEQ ID NO: 3991 - protein, 7 aa, Artificial Sequence
  n-mer motif
MQGLNNM

SEQ ID NO: 3992 - protein, 7 aa, Artificial Sequence
  n-mer motif
GSASNSG

SEQ ID NO: 3993 - protein, 7 aa, Artificial Sequence
  n-mer motif
ANTTGQV

SEQ ID NO: 3994 - protein, 7 aa, Artificial Sequence
  n-mer motif
SVVNTNI

SEQ ID NO: 3995 - protein, 7 aa, Artificial Sequence
  n-mer motif
SNNLNQE

SEQ ID NO: 3996 - protein, 7 aa, Artificial Sequence
  n-mer motif
MNGSGMQ

SEQ ID NO: 3997 - protein, 7 aa, Artificial Sequence
  n-mer motif
ISHDLKY

SEQ ID NO: 3998 - protein, 7 aa, Artificial Sequence
  n-mer motif
TVNADGS

SEQ ID NO: 3999 - protein, 7 aa, Artificial Sequence
  n-mer motif
NHIRNPM

SEQ ID NO: 4000 - protein, 7 aa, Artificial Sequence
  n-mer motif
STRVTLD

SEQ ID NO: 4001 - protein, 7 aa, Artificial Sequence
  n-mer motif
AMGALVH

SEQ ID NO: 4002 - protein, 7 aa, Artificial Sequence
  n-mer motif
AQAMSNS

SEQ ID NO: 4003 - protein, 7 aa, Artificial Sequence
  n-mer motif
NANGMNT

SEQ ID NO: 4004 - protein, 7 aa, Artificial Sequence
  n-mer motif
LTLPSAN

SEQ ID NO: 4005 - protein, 7 aa, Artificial Sequence
  n-mer motif
YQTGDKD

SEQ ID NO: 4006 - protein, 7 aa, Artificial Sequence
  n-mer motif
RREENVN

SEQ ID NO: 4007 - protein, 7 aa, Artificial Sequence
  n-mer motif
GTTTAVA

SEQ ID NO: 4008 - protein, 7 aa, Artificial Sequence
  n-mer motif
TAGGERA

SEQ ID NO: 4009 - protein, 7 aa, Artificial Sequence
  n-mer motif
AGNEPRP

SEQ ID NO: 4010 - protein, 7 aa, Artificial Sequence
  n-mer motif
ANNTANS

SEQ ID NO: 4011 - protein, 7 aa, Artificial Sequence
  n-mer motif
HVNSRDL

SEQ ID NO: 4012 - protein, 7 aa, Artificial Sequence
  n-mer motif
TYQLSGN

SEQ ID NO: 4013 - protein, 7 aa, Artificial Sequence
  n-mer motif
RGDSMAR

SEQ ID NO: 4014 - protein, 7 aa, Artificial Sequence
  n-mer motif
LNNSATV

SEQ ID NO: 4015 - protein, 7 aa, Artificial Sequence
  n-mer motif
LHANNER

SEQ ID NO: 4016 - protein, 7 aa, Artificial Sequence
  n-mer motif
MGSTTGV

SEQ ID NO: 4017 - protein, 7 aa, Artificial Sequence
  n-mer motif
VVAGHAM

SEQ ID NO: 4018 - protein, 7 aa, Artificial Sequence
  n-mer motif
GNEKPSG

SEQ ID NO: 4019 - protein, 7 aa, Artificial Sequence
  n-mer motif
RGTEGTP

SEQ ID NO: 4020 - protein, 7 aa, Artificial Sequence
  n-mer motif
WSPGPEA

SEQ ID NO: 4021 - protein, 7 aa, Artificial Sequence
  n-mer motif
INVNQMA

SEQ ID NO: 4022 - protein, 7 aa, Artificial Sequence
  n-mer motif
RSDVMQS

SEQ ID NO: 4023 - protein, 7 aa, Artificial Sequence
  n-mer motif
RDVSTKE

SEQ ID NO: 4024 - protein, 7 aa, Artificial Sequence
  n-mer motif
KKSPRLE

SEQ ID NO: 4025 - protein, 7 aa, Artificial Sequence
  n-mer motif
TSNTMSD

SEQ ID NO: 4026 - protein, 7 aa, Artificial Sequence
  n-mer motif
SKGNEQM

SEQ ID NO: 4027 - protein, 7 aa, Artificial Sequence
  n-mer motif
GYATTVQ

SEQ ID NO: 4028 - protein, 7 aa, Artificial Sequence
  n-mer motif
GYMSNVI

SEQ ID NO: 4029 - protein, 7 aa, Artificial Sequence
  n-mer motif
VTVSLDG

SEQ ID NO: 4030 - protein, 7 aa, Artificial Sequence
  n-mer motif
TNNLLAQ

SEQ ID NO: 4031 - protein, 7 aa, Artificial Sequence
  n-mer motif
AQTTGYT

SEQ ID NO: 4032 - protein, 7 aa, Artificial Sequence
  n-mer motif
SKSTEIM

SEQ ID NO: 4033 - protein, 7 aa, Artificial Sequence
  n-mer motif
SAMHTLV

SEQ ID NO: 4034 - protein, 7 aa, Artificial Sequence
  n-mer motif
AGVRESF

SEQ ID NO: 4035 - protein, 7 aa, Artificial Sequence
  n-mer motif
QGNSMAS

SEQ ID NO: 4036 - protein, 7 aa, Artificial Sequence
  n-mer motif
KNPSVQE

SEQ ID NO: 4037 - protein, 7 aa, Artificial Sequence
  n-mer motif
PITRESG

SEQ ID NO: 4038 - protein, 7 aa, Artificial Sequence
  n-mer motif
SRSAEIS

SEQ ID NO: 4039 - protein, 7 aa, Artificial Sequence
  n-mer motif
NDIPTRA

SEQ ID NO: 4040 - protein, 7 aa, Artificial Sequence
  n-mer motif
AYGSSGR

SEQ ID NO: 4041 - protein, 7 aa, Artificial Sequence
  n-mer motif
LHGNFSQ

SEQ ID NO: 4042 - protein, 7 aa, Artificial Sequence
  n-mer motif
ASNGQVN

SEQ ID NO: 4043 - protein, 7 aa, Artificial Sequence
  n-mer motif
QKGTVTL

SEQ ID NO: 4044 - protein, 7 aa, Artificial Sequence
  n-mer motif
NSSNTGW

SEQ ID NO: 4045 - protein, 7 aa, Artificial Sequence
  n-mer motif
TYQHQGP

SEQ ID NO: 4046 - protein, 7 aa, Artificial Sequence
  n-mer motif
DGVAHRS

SEQ ID NO: 4047 - protein, 7 aa, Artificial Sequence
  n-mer motif
DGLTLER

SEQ ID NO: 4048 - protein, 7 aa, Artificial Sequence
  n-mer motif
RGDLSTP

SEQ ID NO: 4049 - protein, 7 aa, Artificial Sequence
  n-mer motif
INEIGRM

SEQ ID NO: 4050 - protein, 7 aa, Artificial Sequence
  n-mer motif
PQWGTDP

SEQ ID NO: 4051 - protein, 7 aa, Artificial Sequence
  n-mer motif
KQVAHID

SEQ ID NO: 4052 - protein, 7 aa, Artificial Sequence
  n-mer motif
NTLQNSH

SEQ ID NO: 4053 - protein, 7 aa, Artificial Sequence
  n-mer motif
WSQGNTA

SEQ ID NO: 4054 - protein, 7 aa, Artificial Sequence
  n-mer motif
NETHVPK

SEQ ID NO: 4055 - protein, 7 aa, Artificial Sequence
  n-mer motif
VTNESRA

SEQ ID NO: 4056 - protein, 7 aa, Artificial Sequence
  n-mer motif
PEGHMQD

SEQ ID NO: 4057 - protein, 7 aa, Artificial Sequence
  n-mer motif
LDSTNSR

SEQ ID NO: 4058 - protein, 7 aa, Artificial Sequence
  n-mer motif
QSIGHPV

SEQ ID NO: 4059 - protein, 7 aa, Artificial Sequence
  n-mer motif
VLVNVHN

SEQ ID NO: 4060 - protein, 7 aa, Artificial Sequence
  n-mer motif
VHNPTTT

SEQ ID NO: 4061 - protein, 7 aa, Artificial Sequence
  n-mer motif
GDKASLA

SEQ ID NO: 4062 - protein, 7 aa, Artificial Sequence
  n-mer motif
LNESRAS

SEQ ID NO: 4063 - protein, 7 aa, Artificial Sequence
  n-mer motif
GFHINGE

SEQ ID NO: 4064 - protein, 7 aa, Artificial Sequence
  n-mer motif
SVSSVVL

SEQ ID NO: 4065 - protein, 7 aa, Artificial Sequence
  n-mer motif
LSTTSTK

SEQ ID NO: 4066 - protein, 7 aa, Artificial Sequence
  n-mer motif
TNTQNNP

SEQ ID NO: 4067 - protein, 7 aa, Artificial Sequence
  n-mer motif
TNLAVTL

SEQ ID NO: 4068 - protein, 7 aa, Artificial Sequence
  n-mer motif
MSDRTSD

SEQ ID NO: 4069 - protein, 7 aa, Artificial Sequence
  n-mer motif
SAQSFVV

SEQ ID NO: 4070 - protein, 7 aa, Artificial Sequence
  n-mer motif
MHTSRPP

SEQ ID NO: 4071 - protein, 7 aa, Artificial Sequence
  n-mer motif
MSSHTVQ

SEQ ID NO: 4072 - protein, 7 aa, Artificial Sequence
  n-mer motif
RDTAKGV

SEQ ID NO: 4073 - protein, 7 aa, Artificial Sequence
  n-mer motif
ALKSDSA

SEQ ID NO: 4074 - protein, 7 aa, Artificial Sequence
  n-mer motif
QYDASRQ

SEQ ID NO: 4075 - protein, 7 aa, Artificial Sequence
  n-mer motif
LADSNSK

SEQ ID NO: 4076 - protein, 7 aa, Artificial Sequence
  n-mer motif
FQLASNP

SEQ ID NO: 4077 - protein, 7 aa, Artificial Sequence
  n-mer motif
NSVVGNI

SEQ ID NO: 4078 - protein, 7 aa, Artificial Sequence
  n-mer motif
RYESTSA

SEQ ID NO: 4079 - protein, 7 aa, Artificial Sequence
  n-mer motif
ADHNHIA

SEQ ID NO: 4080 - protein, 7 aa, Artificial Sequence
  n-mer motif
VGDQSRP

SEQ ID NO: 4081 - protein, 7 aa, Artificial Sequence
  n-mer motif
FNETAGR

SEQ ID NO: 4082 - protein, 7 aa, Artificial Sequence
  n-mer motif
SNSYLLN

SEQ ID NO: 4083 - protein, 7 aa, Artificial Sequence
  n-mer motif
RGDTKNY

SEQ ID NO: 4084 - protein, 7 aa, Artificial Sequence
  n-mer motif
TTTTMAY

SEQ ID NO: 4085 - protein, 7 aa, Artificial Sequence
  n-mer motif
RPPNENR

SEQ ID NO: 4086 - protein, 7 aa, Artificial Sequence
  n-mer motif
CANMTNG

SEQ ID NO: 4087 - protein, 7 aa, Artificial Sequence
  n-mer motif
NRSDSFA

SEQ ID NO: 4088 - protein, 7 aa, Artificial Sequence
  n-mer motif
NLLTSSP

SEQ ID NO: 4089 - protein, 7 aa, Artificial Sequence
  n-mer motif
NSREMGV

SEQ ID NO: 4090 - protein, 7 aa, Artificial Sequence
  n-mer motif
MGNQSGA

SEQ ID NO: 4091 - protein, 7 aa, Artificial Sequence
  n-mer motif
MLTETKA

SEQ ID NO: 4092 - protein, 7 aa, Artificial Sequence
  n-mer motif
QNIKNMT

SEQ ID NO: 4093 - protein, 7 aa, Artificial Sequence
  n-mer motif
MSTVLRE

SEQ ID NO: 4094 - protein, 7 aa, Artificial Sequence
  n-mer motif
DRAQNNE

SEQ ID NO: 4095 - protein, 7 aa, Artificial Sequence
  n-mer motif
HTQSTGY

SEQ ID NO: 4096 - protein, 7 aa, Artificial Sequence
  n-mer motif
MSVGKVY

SEQ ID NO: 4097 - protein, 7 aa, Artificial Sequence
  n-mer motif
AGNYQSS

SEQ ID NO: 4098 - protein, 7 aa, Artificial Sequence
  n-mer motif
RNENVNA

SEQ ID NO: 4099 - protein, 7 aa, Artificial Sequence
  n-mer motif
DTHHTSS

SEQ ID NO: 4100 - protein, 7 aa, Artificial Sequence
  n-mer motif
TSSPVLQ

SEQ ID NO: 4101 - protein, 7 aa, Artificial Sequence
  n-mer motif
VGRDAEA

SEQ ID NO: 4102 - protein, 7 aa, Artificial Sequence
  n-mer motif
NMERGSQ

SEQ ID NO: 4103 - protein, 7 aa, Artificial Sequence
  n-mer motif
DRQTGQK

SEQ ID NO: 4104 - protein, 7 aa, Artificial Sequence
  n-mer motif
VFREGIV

SEQ ID NO: 4105 - protein, 7 aa, Artificial Sequence
  n-mer motif
SANNIAT

SEQ ID NO: 4106 - protein, 7 aa, Artificial Sequence
  n-mer motif
VSEGQRI

SEQ ID NO: 4107 - protein, 7 aa, Artificial Sequence
  n-mer motif
HYGNKDI

SEQ ID NO: 4108 - protein, 7 aa, Artificial Sequence
  n-mer motif
DVLLKNF

SEQ ID NO: 4109 - protein, 7 aa, Artificial Sequence
  n-mer motif
HTVQIRE

SEQ ID NO: 4110 - protein, 7 aa, Artificial Sequence
  n-mer motif
TSALAHQ

SEQ ID NO: 4111 - protein, 7 aa, Artificial Sequence
  n-mer motif
IPTGQTS

SEQ ID NO: 4112 - protein, 7 aa, Artificial Sequence
  n-mer motif
RSDKGTL

SEQ ID NO: 4113 - protein, 7 aa, Artificial Sequence
  n-mer motif
NGLTVQR

SEQ ID NO: 4114 - protein, 7 aa, Artificial Sequence
  n-mer motif
TVEGSYP

SEQ ID NO: 4115 - protein, 7 aa, Artificial Sequence
  n-mer motif
TSHLVLA

SEQ ID NO: 4116 - protein, 7 aa, Artificial Sequence
  n-mer motif
NHSLSEH

SEQ ID NO: 4117 - protein, 7 aa, Artificial Sequence
  n-mer motif
LTGMNRD

SEQ ID NO: 4118 - protein, 7 aa, Artificial Sequence
  n-mer motif
SHNAGVA

SEQ ID NO: 4119 - protein, 7 aa, Artificial Sequence
  n-mer motif
AHQTAGP

SEQ ID NO: 4120 - protein, 7 aa, Artificial Sequence
  n-mer motif
NSHDLKY

SEQ ID NO: 4121 - protein, 7 aa, Artificial Sequence
  n-mer motif
TTMSTGQ

SEQ ID NO: 4122 - protein, 7 aa, Artificial Sequence
  n-mer motif
GFGHVPE

SEQ ID NO: 4123 - protein, 7 aa, Artificial Sequence
  n-mer motif
ITAASPQ

SEQ ID NO: 4124 - protein, 7 aa, Artificial Sequence
  n-mer motif
VKASAGD

SEQ ID NO: 4125 - protein, 7 aa, Artificial Sequence
  n-mer motif
SITHSNT

SEQ ID NO: 4126 - protein, 7 aa, Artificial Sequence
  n-mer motif
HNNNMLN

SEQ ID NO: 4127 - protein, 7 aa, Artificial Sequence
  n-mer motif
PKTLTST

SEQ ID NO: 4128 - protein, 7 aa, Artificial Sequence
  n-mer motif
ITGNTVG

SEQ ID NO: 4129 - protein, 7 aa, Artificial Sequence
  n-mer motif
LGNHYTP

SEQ ID NO: 4130 - protein, 7 aa, Artificial Sequence
  n-mer motif
SFTNTNP

SEQ ID NO: 4131 - protein, 7 aa, Artificial Sequence
  n-mer motif
TLDRNQT

SEQ ID NO: 4132 - protein, 7 aa, Artificial Sequence
  n-mer motif
ISTQRPH

SEQ ID NO: 4133 - protein, 7 aa, Artificial Sequence
  n-mer motif
TFTTLGK

SEQ ID NO: 4134 - protein, 7 aa, Artificial Sequence
  n-mer motif
EKPSLVM

SEQ ID NO: 4135 - protein, 7 aa, Artificial Sequence
  n-mer motif
HIETNTS

SEQ ID NO: 4136 - protein, 7 aa, Artificial Sequence
  n-mer motif
GTKDILI

SEQ ID NO: 4137 - protein, 7 aa, Artificial Sequence
  n-mer motif
ATFSHAG

SEQ ID NO: 4138 - protein, 7 aa, Artificial Sequence
  n-mer motif
ANGIFQP

SEQ ID NO: 4139 - protein, 7 aa, Artificial Sequence
  n-mer motif
LNVNTLN

SEQ ID NO: 4140 - protein, 7 aa, Artificial Sequence
  n-mer motif
TSASENW

SEQ ID NO: 4141 - protein, 7 aa, Artificial Sequence
  n-mer motif
LLQGATK

SEQ ID NO: 4142 - protein, 7 aa, Artificial Sequence
  n-mer motif
ALETTRA

SEQ ID NO: 4143 - protein, 7 aa, Artificial Sequence
  n-mer motif
LTGQNEF

SEQ ID NO: 4144 - protein, 7 aa, Artificial Sequence
  n-mer motif
ISHDLKN

SEQ ID NO: 4145 - protein, 7 aa, Artificial Sequence
  n-mer motif
AQYNNGV

SEQ ID NO: 4146 - protein, 7 aa, Artificial Sequence
  n-mer motif
TTSVEKT

SEQ ID NO: 4147 - protein, 7 aa, Artificial Sequence
  n-mer motif
GTSAIMP

SEQ ID NO: 4148 - protein, 7 aa, Artificial Sequence
  n-mer motif
QLQGTEA

SEQ ID NO: 4149 - protein, 7 aa, Artificial Sequence
  n-mer motif
ALKSQEP

SEQ ID NO: 4150 - protein, 7 aa, Artificial Sequence
  n-mer motif
SNSSVAV

SEQ ID NO: 4151 - protein, 7 aa, Artificial Sequence
  n-mer motif
NHGRAID

SEQ ID NO: 4152 - protein, 7 aa, Artificial Sequence
  n-mer motif
DTYNSNT

SEQ ID NO: 4153 - protein, 7 aa, Artificial Sequence
  n-mer motif
TFHQAVK

SEQ ID NO: 4154 - protein, 7 aa, Artificial Sequence
  n-mer motif
WHTGVFQ

SEQ ID NO: 4155 - protein, 7 aa, Artificial Sequence
  n-mer motif
RGDLSTP

SEQ ID NO: 4156 - protein, 7 aa, Artificial Sequence
  n-mer motif
MLSQVLT

SEQ ID NO: 4157 - protein, 7 aa, Artificial Sequence
  n-mer motif
ENEKRES

SEQ ID NO: 4158 - protein, 7 aa, Artificial Sequence
  n-mer motif
ISSYDGN

SEQ ID NO: 4159 - protein, 7 aa, Artificial Sequence
  n-mer motif
TRGDMEF

SEQ ID NO: 4160 - protein, 7 aa, Artificial Sequence
  n-mer motif
NVQNVPG

SEQ ID NO: 4161 - protein, 7 aa, Artificial Sequence
  n-mer motif
SFTNTNP

SEQ ID NO: 4162 - protein, 7 aa, Artificial Sequence
  n-mer motif
SNAGYHS

SEQ ID NO: 4163 - protein, 7 aa, Artificial Sequence
  n-mer motif
DYKNSAP

SEQ ID NO: 4164 - protein, 7 aa, Artificial Sequence
  n-mer motif
VGKNSYE

SEQ ID NO: 4165 - protein, 7 aa, Artificial Sequence
  n-mer motif
AYAGVLG

SEQ ID NO: 4166 - protein, 7 aa, Artificial Sequence
  n-mer motif
TTSERVN

SEQ ID NO: 4167 - protein, 7 aa, Artificial Sequence
  n-mer motif
DTGIKNV

SEQ ID NO: 4168 - protein, 7 aa, Artificial Sequence
  n-mer motif
STSSLVP

SEQ ID NO: 4169 - protein, 7 aa, Artificial Sequence
  n-mer motif
WSAGERV

SEQ ID NO: 4170 - protein, 7 aa, Artificial Sequence
  n-mer motif
SSGSLIT

SEQ ID NO: 4171 - protein, 7 aa, Artificial Sequence
  n-mer motif
WISTEMR

SEQ ID NO: 4172 - protein, 7 aa, Artificial Sequence
  n-mer motif
FAAGAHG

SEQ ID NO: 4173 - protein, 7 aa, Artificial Sequence
  n-mer motif
IGDRDQR

SEQ ID NO: 4174 - protein, 7 aa, Artificial Sequence
  n-mer motif
STIGNST

SEQ ID NO: 4175 - protein, 7 aa, Artificial Sequence
  n-mer motif
GSGTVGR

SEQ ID NO: 4176 - protein, 7 aa, Artificial Sequence
  n-mer motif
HVTAVVD

SEQ ID NO: 4177 - protein, 7 aa, Artificial Sequence
  n-mer motif
DKAGVAN

SEQ ID NO: 4178 - protein, 7 aa, Artificial Sequence
  n-mer motif
RLTDTMH

SEQ ID NO: 4179 - protein, 7 aa, Artificial Sequence
  n-mer motif
LNTLIHK

SEQ ID NO: 4180 - protein, 7 aa, Artificial Sequence
  n-mer motif
SYQNPPP

SEQ ID NO: 4181 - protein, 7 aa, Artificial Sequence
  n-mer motif
LTGLNAF

SEQ ID NO: 4182 - protein, 7 aa, Artificial Sequence
  n-mer motif
SPVLSPS

SEQ ID NO: 4183 - protein, 7 aa, Artificial Sequence
  n-mer motif
VQTHIGV

SEQ ID NO: 4184 - protein, 7 aa, Artificial Sequence
  n-mer motif
HMSSVAT

SEQ ID NO: 4185 - protein, 7 aa, Artificial Sequence
  n-mer motif
GKANDGS

SEQ ID NO: 4186 - protein, 7 aa, Artificial Sequence
  n-mer motif
STNDERK

SEQ ID NO: 4187 - protein, 7 aa, Artificial Sequence
  n-mer motif
QGGNSRF

SEQ ID NO: 4188 - protein, 7 aa, Artificial Sequence
  n-mer motif
PNNEKNP

SEQ ID NO: 4189 - protein, 7 aa, Artificial Sequence
  n-mer motif
VAATGGT

SEQ ID NO: 4190 - protein, 7 aa, Artificial Sequence
  n-mer motif
AIVDRGS

SEQ ID NO: 4191 - protein, 7 aa, Artificial Sequence
  n-mer motif
SQHHTPL

SEQ ID NO: 4192 - protein, 7 aa, Artificial Sequence
  n-mer motif
LQSSMNV

SEQ ID NO: 4193 - protein, 7 aa, Artificial Sequence
  n-mer motif
RETNPSE

SEQ ID NO: 4194 - protein, 7 aa, Artificial Sequence
  n-mer motif
GFGHLPE

SEQ ID NO: 4195 - protein, 7 aa, Artificial Sequence
  n-mer motif
RNATVTV

SEQ ID NO: 4196 - protein, 7 aa, Artificial Sequence
  n-mer motif
VSNASGL

SEQ ID NO: 4197 - protein, 7 aa, Artificial Sequence
  n-mer motif
DRPNNES

SEQ ID NO: 4198 - protein, 7 aa, Artificial Sequence
  n-mer motif
QVSLVKL

SEQ ID NO: 4199 - protein, 7 aa, Artificial Sequence
  n-mer motif
SNMREEI

SEQ ID NO: 4200 - protein, 7 aa, Artificial Sequence
  n-mer motif
DIGRSNS

SEQ ID NO: 4201 - protein, 7 aa, Artificial Sequence
  n-mer motif
DHMNLRS

SEQ ID NO: 4202 - protein, 7 aa, Artificial Sequence
  n-mer motif
IERSSDR

SEQ ID NO: 4203 - protein, 7 aa, Artificial Sequence
  n-mer motif
LSQNFNP

SEQ ID NO: 4204 - protein, 7 aa, Artificial Sequence
  n-mer motif
YSMGQQP

SEQ ID NO: 4205 - protein, 7 aa, Artificial Sequence
  n-mer motif
YTQGIMN

SEQ ID NO: 4206 - protein, 7 aa, Artificial Sequence
  n-mer motif
MLSHGAL

SEQ ID NO: 4207 - protein, 7 aa, Artificial Sequence
  n-mer motif
AYNARLP

SEQ ID NO: 4208 - protein, 7 aa, Artificial Sequence
  n-mer motif
RHYSDNA

SEQ ID NO: 4209 - protein, 7 aa, Artificial Sequence
  n-mer motif
AHTAMTY

SEQ ID NO: 4210 - protein, 7 aa, Artificial Sequence
  n-mer motif
LTGSDMK

SEQ ID NO: 4211 - protein, 7 aa, Artificial Sequence
  n-mer motif
TLHTKDL

SEQ ID NO: 4212 - protein, 7 aa, Artificial Sequence
  n-mer motif
SGQNGTS

SEQ ID NO: 4213 - protein, 7 aa, Artificial Sequence
  n-mer motif
RGDVHTN

SEQ ID NO: 4214 - protein, 7 aa, Artificial Sequence
  n-mer motif
TGTATLP

SEQ ID NO: 4215 - protein, 7 aa, Artificial Sequence
  n-mer motif
LGTLLSQ

SEQ ID NO: 4216 - protein, 7 aa, Artificial Sequence
  n-mer motif
VLSSNLY

SEQ ID NO: 4217 - protein, 7 aa, Artificial Sequence
  n-mer motif
SLGSDRM

SEQ ID NO: 4218 - protein, 7 aa, Artificial Sequence
  n-mer motif
RGDLSTP

SEQ ID NO: 4219 - protein, 7 aa, Artificial Sequence
  n-mer motif
RMSESSD

SEQ ID NO: 4220 - protein, 7 aa, Artificial Sequence
  n-mer motif
MTEKASI

SEQ ID NO: 4221 - protein, 6 aa, Artificial Sequence
  n-mer motif
TEQSYR

SEQ ID NO: 4222 - protein, 7 aa, Artificial Sequence
  n-mer motif
VESKSEP

SEQ ID NO: 4223 - protein, 7 aa, Artificial Sequence
  n-mer motif
MNLVRDS

SEQ ID NO: 4224 - protein, 7 aa, Artificial Sequence
  n-mer motif
QNHSITT

SEQ ID NO: 4225 - protein, 7 aa, Artificial Sequence
  n-mer motif
TLDNNHS

SEQ ID NO: 4226 - protein, 7 aa, Artificial Sequence
  n-mer motif
TKSFNDL

SEQ ID NO: 4227 - protein, 7 aa, Artificial Sequence
  n-mer motif
ATEHSGR

SEQ ID NO: 4228 - protein, 7 aa, Artificial Sequence
  n-mer motif
QGTLLSP

SEQ ID NO: 4229 - protein, 7 aa, Artificial Sequence
  n-mer motif
TFHQGVK

SEQ ID NO: 4230 - protein, 7 aa, Artificial Sequence
  n-mer motif
CQRADCA

SEQ ID NO: 4231 - protein, 7 aa, Artificial Sequence
  n-mer motif
RYDGTLN

SEQ ID NO: 4232 - protein, 7 aa, Artificial Sequence
  n-mer motif
QGGTNNP

SEQ ID NO: 4233 - protein, 7 aa, Artificial Sequence
  n-mer motif
GGNYHTT

SEQ ID NO: 4234 - protein, 7 aa, Artificial Sequence
  n-mer motif
LVVQSAQ

SEQ ID NO: 4235 - protein, 7 aa, Artificial Sequence
  n-mer motif
YPHESKN

SEQ ID NO: 4236 - protein, 7 aa, Artificial Sequence
  n-mer motif
EIVRHTH

SEQ ID NO: 4237 - protein, 7 aa, Artificial Sequence
  n-mer motif
DRTNNMS

SEQ ID NO: 4238 - protein, 7 aa, Artificial Sequence
  n-mer motif
SVTNGAE

SEQ ID NO: 4239 - protein, 7 aa, Artificial Sequence
  n-mer motif
SGQKNSE

SEQ ID NO: 4240 - protein, 7 aa, Artificial Sequence
  n-mer motif
EQKKTDH

SEQ ID NO: 4241 - protein, 7 aa, Artificial Sequence
  n-mer motif
NINGGGN

SEQ ID NO: 4242 - protein, 7 aa, Artificial Sequence
  n-mer motif
KLHTKDL

SEQ ID NO: 4243 - protein, 7 aa, Artificial Sequence
  n-mer motif
SFLVAHP

SEQ ID NO: 4244 - protein, 7 aa, Artificial Sequence
  n-mer motif
YQQNIEI

SEQ ID NO: 4245 - protein, 7 aa, Artificial Sequence
  n-mer motif
RGDLSTT

SEQ ID NO: 4246 - protein, 7 aa, Artificial Sequence
  n-mer motif
ANLNLTS

SEQ ID NO: 4247 - protein, 7 aa, Artificial Sequence
  n-mer motif
TVQHAAT

SEQ ID NO: 4248 - protein, 7 aa, Artificial Sequence
  n-mer motif
TVNLLAA

SEQ ID NO: 4249 - protein, 7 aa, Artificial Sequence
  n-mer motif
NQRVEQK

SEQ ID NO: 4250 - protein, 7 aa, Artificial Sequence
  n-mer motif
NTYTAAK

SEQ ID NO: 4251 - protein, 7 aa, Artificial Sequence
  n-mer motif
IQRDVGH

SEQ ID NO: 4252 - protein, 7 aa, Artificial Sequence
  n-mer motif
ISEMTRY

SEQ ID NO: 4253 - protein, 7 aa, Artificial Sequence
  n-mer motif
IATNVIY

SEQ ID NO: 4254 - protein, 7 aa, Artificial Sequence
  n-mer motif
NGNHSID

SEQ ID NO: 4255 - protein, 7 aa, Artificial Sequence
  n-mer motif
TSIGSAK

SEQ ID NO: 4256 - protein, 7 aa, Artificial Sequence
  n-mer motif
NVHSVDK

SEQ ID NO: 4257 - protein, 7 aa, Artificial Sequence
  n-mer motif
ELSVPKP

SEQ ID NO: 4258 - protein, 7 aa, Artificial Sequence
  n-mer motif
FLDKYNY

SEQ ID NO: 4259 - protein, 7 aa, Artificial Sequence
  n-mer motif
YIPNNSG

SEQ ID NO: 4260 - protein, 7 aa, Artificial Sequence
  n-mer motif
GLGQPQL

SEQ ID NO: 4261 - protein, 7 aa, Artificial Sequence
  n-mer motif
EGSQGNH

SEQ ID NO: 4262 - protein, 7 aa, Artificial Sequence
  n-mer motif
NIYMASG

SEQ ID NO: 4263 - protein, 7 aa, Artificial Sequence
  n-mer motif
NLQTGVQ

SEQ ID NO: 4264 - protein, 7 aa, Artificial Sequence
  n-mer motif
TVAPYSS

SEQ ID NO: 4265 - protein, 7 aa, Artificial Sequence
  n-mer motif
SNYSDGI

SEQ ID NO: 4266 - protein, 7 aa, Artificial Sequence
  n-mer motif
ATYVVGT

SEQ ID NO: 4267 - protein, 7 aa, Artificial Sequence
  n-mer motif
SREAGST

SEQ ID NO: 4268 - protein, 7 aa, Artificial Sequence
  n-mer motif
AGKTHAD

SEQ ID NO: 4269 - protein, 7 aa, Artificial Sequence
  n-mer motif
PLSLHNS

SEQ ID NO: 4270 - protein, 7 aa, Artificial Sequence
  n-mer motif
LRDLNGG

SEQ ID NO: 4271 - protein, 7 aa, Artificial Sequence
  n-mer motif
DRTYSNT

SEQ ID NO: 4272 - protein, 7 aa, Artificial Sequence
  n-mer motif
SVTSGTQ

SEQ ID NO: 4273 - protein, 7 aa, Artificial Sequence
  n-mer motif
NMTSAYH

SEQ ID NO: 4274 - protein, 7 aa, Artificial Sequence
  n-mer motif
VMGGPGI

SEQ ID NO: 4275 - protein, 7 aa, Artificial Sequence
  n-mer motif
AGTHTDK

SEQ ID NO: 4276 - protein, 7 aa, Artificial Sequence
  n-mer motif
GTMNIGI

SEQ ID NO: 4277 - protein, 7 aa, Artificial Sequence
  n-mer motif
TAGGERA

SEQ ID NO: 4278 - protein, 7 aa, Artificial Sequence
  n-mer motif
GMTSNQV

SEQ ID NO: 4279 - protein, 7 aa, Artificial Sequence
  n-mer motif
HFSQITN

SEQ ID NO: 4280 - protein, 7 aa, Artificial Sequence
  n-mer motif
SRIENNN

SEQ ID NO: 4281 - protein, 7 aa, Artificial Sequence
  n-mer motif
DTASYNN

SEQ ID NO: 4282 - protein, 7 aa, Artificial Sequence
  n-mer motif
VNQSPGA

SEQ ID NO: 4283 - protein, 7 aa, Artificial Sequence
  n-mer motif
NNMGHGH

SEQ ID NO: 4284 - protein, 7 aa, Artificial Sequence
  n-mer motif
SRLSQDP

SEQ ID NO: 4285 - protein, 7 aa, Artificial Sequence
  n-mer motif
STSQAVQ

SEQ ID NO: 4286 - protein, 7 aa, Artificial Sequence
  n-mer motif
RWQGLSA

SEQ ID NO: 4287 - protein, 7 aa, Artificial Sequence
  n-mer motif
AHMHSEL

SEQ ID NO: 4288 - protein, 7 aa, Artificial Sequence
  n-mer motif
NNLTNST

SEQ ID NO: 4289 - protein, 7 aa, Artificial Sequence
  n-mer motif
QPSASEL

SEQ ID NO: 4290 - protein, 7 aa, Artificial Sequence
  n-mer motif
GTSLENR

SEQ ID NO: 4291 - protein, 7 aa, Artificial Sequence
  n-mer motif
LSNSITP

SEQ ID NO: 4292 - protein, 7 aa, Artificial Sequence
  n-mer motif
TIVSTSY

SEQ ID NO: 4293 - protein, 7 aa, Artificial Sequence
  n-mer motif
TLGYPDK

SEQ ID NO: 4294 - protein, 7 aa, Artificial Sequence
  n-mer motif
SRHDVRN

SEQ ID NO: 4295 - protein, 7 aa, Artificial Sequence
  n-mer motif
NGSVANP

SEQ ID NO: 4296 - protein, 7 aa, Artificial Sequence
  n-mer motif
AMDGYRV

SEQ ID NO: 4297 - protein, 7 aa, Artificial Sequence
  n-mer motif
WTGAQPS

SEQ ID NO: 4298 - protein, 7 aa, Artificial Sequence
  n-mer motif
KNGAIGT

SEQ ID NO: 4299 - protein, 7 aa, Artificial Sequence
  n-mer motif
VLPSRIA

SEQ ID NO: 4300 - protein, 7 aa, Artificial Sequence
  n-mer motif
DNVNSQP

SEQ ID NO: 4301 - protein, 7 aa, Artificial Sequence
  n-mer motif
GVNASYS

SEQ ID NO: 4302 - protein, 7 aa, Artificial Sequence
  n-mer motif
LSHAMDR

SEQ ID NO: 4303 - protein, 7 aa, Artificial Sequence
  n-mer motif
RAHGDNQ

SEQ ID NO: 4304 - protein, 7 aa, Artificial Sequence
  n-mer motif
LQTPGTT

SEQ ID NO: 4305 - protein, 7 aa, Artificial Sequence
  n-mer motif
TQVVSIY

SEQ ID NO: 4306 - protein, 7 aa, Artificial Sequence
  n-mer motif
QVQGTLG

SEQ ID NO: 4307 - protein, 7 aa, Artificial Sequence
  n-mer motif
VGNQNLP

SEQ ID NO: 4308 - protein, 7 aa, Artificial Sequence
  n-mer motif
YVDYSKS

SEQ ID NO: 4309 - protein, 7 aa, Artificial Sequence
  n-mer motif
LLNSSGV

SEQ ID NO: 4310 - protein, 7 aa, Artificial Sequence
  n-mer motif
NQSLTMD

SEQ ID NO: 4311 - protein, 7 aa, Artificial Sequence
  n-mer motif
AGKDLSN

SEQ ID NO: 4312 - protein, 7 aa, Artificial Sequence
  n-mer motif
SYVSVPA

SEQ ID NO: 4313 - protein, 7 aa, Artificial Sequence
  n-mer motif
NEGRVQT

SEQ ID NO: 4314 - protein, 7 aa, Artificial Sequence
  n-mer motif
TLTQTGM

SEQ ID NO: 4315 - protein, 7 aa, Artificial Sequence
  n-mer motif
GFALTGT

SEQ ID NO: 4316 - protein, 7 aa, Artificial Sequence
  n-mer motif
QSTLNRP

SEQ ID NO: 4317 - protein, 7 aa, Artificial Sequence
  n-mer motif
TTTHSIS

SEQ ID NO: 4318 - protein, 7 aa, Artificial Sequence
  n-mer motif
NTHRQEY

SEQ ID NO: 4319 - protein, 7 aa, Artificial Sequence
  n-mer motif
SQIVNTT

SEQ ID NO: 4320 - protein, 7 aa, Artificial Sequence
  n-mer motif
LVLEMQT

SEQ ID NO: 4321 - protein, 7 aa, Artificial Sequence
  n-mer motif
NDISTQR

SEQ ID NO: 4322 - protein, 7 aa, Artificial Sequence
  n-mer motif
YTADKKQ

SEQ ID NO: 4323 - protein, 7 aa, Artificial Sequence
  n-mer motif
FGATTTA

SEQ ID NO: 4324 - protein, 7 aa, Artificial Sequence
  n-mer motif
VQISMNN

SEQ ID NO: 4325 - protein, 7 aa, Artificial Sequence
  n-mer motif
MHAQESR

SEQ ID NO: 4326 - protein, 7 aa, Artificial Sequence
  n-mer motif
HVNTADR

SEQ ID NO: 4327 - protein, 7 aa, Artificial Sequence
  n-mer motif
YSTDSTK

SEQ ID NO: 4328 - protein, 7 aa, Artificial Sequence
  n-mer motif
GHDRTPN

SEQ ID NO: 4329 - protein, 7 aa, Artificial Sequence
  n-mer motif
TSGVLTR

SEQ ID NO: 4330 - protein, 7 aa, Artificial Sequence
  n-mer motif
NIAMSKI

SEQ ID NO: 4331 - protein, 7 aa, Artificial Sequence
  n-mer motif
MGTEYRM

SEQ ID NO: 4332 - protein, 7 aa, Artificial Sequence
  n-mer motif
PYANRLE

SEQ ID NO: 4333 - protein, 7 aa, Artificial Sequence
  n-mer motif
PLQNNKT

SEQ ID NO: 4334 - protein, 7 aa, Artificial Sequence
  n-mer motif
SLTEKAP

SEQ ID NO: 4335 - protein, 7 aa, Artificial Sequence
  n-mer motif
NMVYTNV

SEQ ID NO: 4336 - protein, 7 aa, Artificial Sequence
  n-mer motif
MLSATQG

SEQ ID NO: 4337 - protein, 7 aa, Artificial Sequence
  n-mer motif
NMTHSTV

SEQ ID NO: 4338 - protein, 7 aa, Artificial Sequence
  n-mer motif
IYTNSHV

SEQ ID NO: 4339 - protein, 7 aa, Artificial Sequence
  n-mer motif
WSHDRPT

SEQ ID NO: 4340 - protein, 7 aa, Artificial Sequence
  n-mer motif
EKGTPSS

SEQ ID NO: 4341 - protein, 7 aa, Artificial Sequence
  n-mer motif
HHSTESL

SEQ ID NO: 4342 - protein, 7 aa, Artificial Sequence
  n-mer motif
PKSTQVM

SEQ ID NO: 4343 - protein, 7 aa, Artificial Sequence
  n-mer motif
SDRTAQQ

SEQ ID NO: 4344 - protein, 7 aa, Artificial Sequence
  n-mer motif
ATLARTS

SEQ ID NO: 4345 - protein, 7 aa, Artificial Sequence
  n-mer motif
ISQVSFN

SEQ ID NO: 4346 - protein, 7 aa, Artificial Sequence
  n-mer motif
HYGNKDI

SEQ ID NO: 4347 - protein, 7 aa, Artificial Sequence
  n-mer motif
NDGTDRR

SEQ ID NO: 4348 - protein, 7 aa, Artificial Sequence
  n-mer motif
TNHITGP

SEQ ID NO: 4349 - protein, 7 aa, Artificial Sequence
  n-mer motif
TNSNQSS

SEQ ID NO: 4350 - protein, 7 aa, Artificial Sequence
  n-mer motif
VATHYNE

SEQ ID NO: 4351 - protein, 7 aa, Artificial Sequence
  n-mer motif
DLGTART

SEQ ID NO: 4352 - protein, 7 aa, Artificial Sequence
  n-mer motif
ALSQSAG

SEQ ID NO: 4353 - protein, 7 aa, Artificial Sequence
  n-mer motif
KTTLHQA

SEQ ID NO: 4354 - protein, 7 aa, Artificial Sequence
  n-mer motif
MINAITP

SEQ ID NO: 4355 - protein, 7 aa, Artificial Sequence
  n-mer motif
GSTPGAS

SEQ ID NO: 4356 - protein, 7 aa, Artificial Sequence
  n-mer motif
NEKPQST

SEQ ID NO: 4357 - protein, 7 aa, Artificial Sequence
  n-mer motif
SLMGSAG

SEQ ID NO: 4358 - protein, 7 aa, Artificial Sequence
  n-mer motif
TDTLSER

SEQ ID NO: 4359 - protein, 7 aa, Artificial Sequence
  n-mer motif
ASQSEKN

SEQ ID NO: 4360 - protein, 7 aa, Artificial Sequence
  n-mer motif
AVRTPAM

SEQ ID NO: 4361 - protein, 7 aa, Artificial Sequence
  n-mer motif
PNASFGP

SEQ ID NO: 4362 - protein, 7 aa, Artificial Sequence
  n-mer motif
KAHVVEI

SEQ ID NO: 4363 - protein, 7 aa, Artificial Sequence
  n-mer motif
YISAPPM

SEQ ID NO: 4364 - protein, 7 aa, Artificial Sequence
  n-mer motif
PIQNESS

SEQ ID NO: 4365 - protein, 7 aa, Artificial Sequence
  n-mer motif
GVTNASK

SEQ ID NO: 4366 - protein, 7 aa, Artificial Sequence
  n-mer motif
VNGGKPV

SEQ ID NO: 4367 - protein, 7 aa, Artificial Sequence
  n-mer motif
SVLSSST

SEQ ID NO: 4368 - protein, 7 aa, Artificial Sequence
  n-mer motif
LAQGTDR

SEQ ID NO: 4369 - protein, 7 aa, Artificial Sequence
  n-mer motif
QSVSTGA

SEQ ID NO: 4370 - protein, 7 aa, Artificial Sequence
  n-mer motif
LTQVYHE

SEQ ID NO: 4371 - protein, 7 aa, Artificial Sequence
  n-mer motif
REMSSLS

SEQ ID NO: 4372 - protein, 7 aa, Artificial Sequence
  n-mer motif
TSTMTAR

SEQ ID NO: 4373 - protein, 7 aa, Artificial Sequence
  n-mer motif
TIQQVSN

SEQ ID NO: 4374 - protein, 7 aa, Artificial Sequence
  n-mer motif
RTQAGDS

SEQ ID NO: 4375 - protein, 7 aa, Artificial Sequence
  n-mer motif
NTYTAGK

SEQ ID NO: 4376 - protein, 7 aa, Artificial Sequence
  n-mer motif
NEQNTPS

SEQ ID NO: 4377 - protein, 7 aa, Artificial Sequence
  n-mer motif
GFAQQEA

SEQ ID NO: 4378 - protein, 7 aa, Artificial Sequence
  n-mer motif
SPQHGVI

SEQ ID NO: 4379 - protein, 7 aa, Artificial Sequence
  n-mer motif
AVHATSS

SEQ ID NO: 4380 - protein, 7 aa, Artificial Sequence
  n-mer motif
GDTRGAH

SEQ ID NO: 4381 - protein, 7 aa, Artificial Sequence
  n-mer motif
VRETTHL

SEQ ID NO: 4382 - protein, 7 aa, Artificial Sequence
  n-mer motif
LSQQRDY

SEQ ID NO: 4383 - protein, 7 aa, Artificial Sequence
  n-mer motif
ATRGESS

SEQ ID NO: 4384 - protein, 7 aa, Artificial Sequence
  n-mer motif
TNDSVGS

SEQ ID NO: 4385 - protein, 7 aa, Artificial Sequence
  n-mer motif
LTNNFKD

SEQ ID NO: 4386 - protein, 7 aa, Artificial Sequence
  n-mer motif
VNGTQIF

SEQ ID NO: 4387 - protein, 7 aa, Artificial Sequence
  n-mer motif
GNTGSPG

SEQ ID NO: 4388 - protein, 7 aa, Artificial Sequence
  n-mer motif
WTANQGL

SEQ ID NO: 4389 - protein, 7 aa, Artificial Sequence
  n-mer motif
NTTPTNH

SEQ ID NO: 4390 - protein, 7 aa, Artificial Sequence
  n-mer motif
ERVNGMA

SEQ ID NO: 4391 - protein, 7 aa, Artificial Sequence
  n-mer motif
KVTNNAY

SEQ ID NO: 4392 - protein, 7 aa, Artificial Sequence
  n-mer motif
LSSESPR

SEQ ID NO: 4393 - protein, 7 aa, Artificial Sequence
  n-mer motif
HTAAVAT

SEQ ID NO: 4394 - protein, 7 aa, Artificial Sequence
  n-mer motif
YDSRLYA

SEQ ID NO: 4395 - protein, 7 aa, Artificial Sequence
  n-mer motif
IEHMLRP

SEQ ID NO: 4396 - protein, 7 aa, Artificial Sequence
  n-mer motif
YLESNYT

SEQ ID NO: 4397 - protein, 7 aa, Artificial Sequence
  n-mer motif
AYSSTGH

SEQ ID NO: 4398 - protein, 7 aa, Artificial Sequence
  n-mer motif
IDISTQS

SEQ ID NO: 4399 - protein, 7 aa, Artificial Sequence
  n-mer motif
TTNSGAT

SEQ ID NO: 4400 - protein, 7 aa, Artificial Sequence
  n-mer motif
NVLTTVV

SEQ ID NO: 4401 - protein, 7 aa, Artificial Sequence
  n-mer motif
TTGIERS

SEQ ID NO: 4402 - protein, 7 aa, Artificial Sequence
  n-mer motif
ARVDTNQ

SEQ ID NO: 4403 - protein, 7 aa, Artificial Sequence
  n-mer motif
QSVKEAI

SEQ ID NO: 4404 - protein, 7 aa, Artificial Sequence
  n-mer motif
ALLSVNE

SEQ ID NO: 4405 - protein, 7 aa, Artificial Sequence
  n-mer motif
GRDNHHA

SEQ ID NO: 4406 - protein, 7 aa, Artificial Sequence
  n-mer motif
IQSQSQL

SEQ ID NO: 4407 - protein, 7 aa, Artificial Sequence
  n-mer motif
SEGSSRS

SEQ ID NO: 4408 - protein, 7 aa, Artificial Sequence
  n-mer motif
DVQNIRE

SEQ ID NO: 4409 - protein, 7 aa, Artificial Sequence
  n-mer motif
KGHAYEA

SEQ ID NO: 4410 - protein, 7 aa, Artificial Sequence
  n-mer motif
YVRAQDQ

SEQ ID NO: 4411 - protein, 7 aa, Artificial Sequence
  n-mer motif
VDEYRSR

SEQ ID NO: 4412 - protein, 7 aa, Artificial Sequence
  n-mer motif
TLSGYMR

SEQ ID NO: 4413 - protein, 7 aa, Artificial Sequence
  n-mer motif
PSVRLPL

SEQ ID NO: 4414 - protein, 7 aa, Artificial Sequence
  n-mer motif
NIAGGEQ

SEQ ID NO: 4415 - protein, 7 aa, Artificial Sequence
  n-mer motif
LLQSTYL

SEQ ID NO: 4416 - protein, 7 aa, Artificial Sequence
  n-mer motif
QSDTTSI

SEQ ID NO: 4417 - protein, 7 aa, Artificial Sequence
  n-mer motif
IRSGNAM

SEQ ID NO: 4418 - protein, 7 aa, Artificial Sequence
  n-mer motif
MLSQVLT

SEQ ID NO: 4419 - protein, 7 aa, Artificial Sequence
  n-mer motif
TERQIEL

SEQ ID NO: 4420 - protein, 7 aa, Artificial Sequence
  n-mer motif
GTHASAY

SEQ ID NO: 4421 - protein, 7 aa, Artificial Sequence
  n-mer motif
VESSYSR

SEQ ID NO: 4422 - protein, 7 aa, Artificial Sequence
  n-mer motif
GGNYHTK

SEQ ID NO: 4423 - protein, 7 aa, Artificial Sequence
  n-mer motif
PTSHQEP

SEQ ID NO: 4424 - protein, 7 aa, Artificial Sequence
  n-mer motif
TIIGVLP

SEQ ID NO: 4425 - protein, 7 aa, Artificial Sequence
  n-mer motif
SNSGSTL

SEQ ID NO: 4426 - protein, 7 aa, Artificial Sequence
  n-mer motif
SITTVAN

SEQ ID NO: 4427 - protein, 7 aa, Artificial Sequence
  n-mer motif
ASPAQTG

SEQ ID NO: 4428 - protein, 7 aa, Artificial Sequence
  n-mer motif
SLPSHSN

SEQ ID NO: 4429 - protein, 7 aa, Artificial Sequence
  n-mer motif
LHNAVGP

SEQ ID NO: 4430 - protein, 7 aa, Artificial Sequence
  n-mer motif
QAPPTAQ

SEQ ID NO: 4431 - protein, 7 aa, Artificial Sequence
  n-mer motif
PNTASNF

SEQ ID NO: 4432 - protein, 7 aa, Artificial Sequence
  n-mer motif
PSNSERF

SEQ ID NO: 4433 - protein, 7 aa, Artificial Sequence
  n-mer motif
ELHAQQP

SEQ ID NO: 4434 - protein, 7 aa, Artificial Sequence
  n-mer motif
GSYSDGS

SEQ ID NO: 4435 - protein, 7 aa, Artificial Sequence
  n-mer motif
YGVQANS

SEQ ID NO: 4436 - protein, 7 aa, Artificial Sequence
  n-mer motif
EVGKTTH

SEQ ID NO: 4437 - protein, 7 aa, Artificial Sequence
  n-mer motif
TSQGRSP

SEQ ID NO: 4438 - protein, 7 aa, Artificial Sequence
  n-mer motif
VEHVAHQ

SEQ ID NO: 4439 - protein, 7 aa, Artificial Sequence
  n-mer motif
IQSSYNR

SEQ ID NO: 4440 - protein, 7 aa, Artificial Sequence
  n-mer motif
TLSVTLG

SEQ ID NO: 4441 - protein, 7 aa, Artificial Sequence
  n-mer motif
RNEPVST

SEQ ID NO: 4442 - protein, 7 aa, Artificial Sequence
  n-mer motif
VIVGSNE

SEQ ID NO: 4443 - protein, 7 aa, Artificial Sequence
  n-mer motif
ELSTPMV

SEQ ID NO: 4444 - protein, 7 aa, Artificial Sequence
  n-mer motif
AYNDLRS

SEQ ID NO: 4445 - protein, 7 aa, Artificial Sequence
  n-mer motif
NANSGER

SEQ ID NO: 4446 - protein, 7 aa, Artificial Sequence
  n-mer motif
LSSQWTQ

SEQ ID NO: 4447 - protein, 7 aa, Artificial Sequence
  n-mer motif
INAGNYR

SEQ ID NO: 4448 - protein, 7 aa, Artificial Sequence
  n-mer motif
LRSSEAP

SEQ ID NO: 4449 - protein, 7 aa, Artificial Sequence
  n-mer motif
TSDTNAR

SEQ ID NO: 4450 - protein, 7 aa, Artificial Sequence
  n-mer motif
PNSPHGS

SEQ ID NO: 4451 - protein, 7 aa, Artificial Sequence
  n-mer motif
TQHLPST

SEQ ID NO: 4452 - protein, 7 aa, Artificial Sequence
  n-mer motif
VHGNAPA

SEQ ID NO: 4453 - protein, 7 aa, Artificial Sequence
  n-mer motif
SSQRDSV

SEQ ID NO: 4454 - protein, 7 aa, Artificial Sequence
  n-mer motif
PPSVDRK

SEQ ID NO: 4455 - protein, 7 aa, Artificial Sequence
  n-mer motif
ETLPYKS

SEQ ID NO: 4456 - protein, 7 aa, Artificial Sequence
  n-mer motif
HLSQANH

SEQ ID NO: 4457 - protein, 7 aa, Artificial Sequence
  n-mer motif
KPLNGTN

SEQ ID NO: 4458 - protein, 7 aa, Artificial Sequence
  n-mer motif
WQTNGMQ

SEQ ID NO: 4459 - protein, 7 aa, Artificial Sequence
  n-mer motif
TVNVHSD

SEQ ID NO: 4460 - protein, 7 aa, Artificial Sequence
  n-mer motif
TQYVVAP

SEQ ID NO: 4461 - protein, 7 aa, Artificial Sequence
  n-mer motif
NVDSSNV

SEQ ID NO: 4462 - protein, 7 aa, Artificial Sequence
  n-mer motif
NGYQLQI

SEQ ID NO: 4463 - protein, 7 aa, Artificial Sequence
  n-mer motif
EETRTRM

SEQ ID NO: 4464 - protein, 7 aa, Artificial Sequence
  n-mer motif
TSPASDR

SEQ ID NO: 4465 - protein, 7 aa, Artificial Sequence
  n-mer motif
HSGAGVL

SEQ ID NO: 4466 - protein, 7 aa, Artificial Sequence
  n-mer motif
AANPSTE

SEQ ID NO: 4467 - protein, 7 aa, Artificial Sequence
  n-mer motif
MLVQNTP

SEQ ID NO: 4468 - protein, 7 aa, Artificial Sequence
  n-mer motif
VQQNNIN

SEQ ID NO: 4469 - protein, 7 aa, Artificial Sequence
  n-mer motif
HDGYVPN

SEQ ID NO: 4470 - protein, 7 aa, Artificial Sequence
  n-mer motif
NSGNNPI

SEQ ID NO: 4471 - protein, 7 aa, Artificial Sequence
  n-mer motif
TDNPSYK

SEQ ID NO: 4472 - protein, 7 aa, Artificial Sequence
  n-mer motif
GGLSLSS

SEQ ID NO: 4473 - protein, 7 aa, Artificial Sequence
  n-mer motif
NNENTRN

SEQ ID NO: 4474 - protein, 7 aa, Artificial Sequence
  n-mer motif
KNNNSDS

SEQ ID NO: 4475 - protein, 7 aa, Artificial Sequence
  n-mer motif
KDEHLHY

SEQ ID NO: 4476 - protein, 7 aa, Artificial Sequence
  n-mer motif
NFTITEA

SEQ ID NO: 4477 - protein, 7 aa, Artificial Sequence
  n-mer motif
LNQNSVS

SEQ ID NO: 4478 - protein, 7 aa, Artificial Sequence
  n-mer motif
NSHVPNN

SEQ ID NO: 4479 - protein, 7 aa, Artificial Sequence
  n-mer motif
NSTHINS

SEQ ID NO: 4480 - protein, 7 aa, Artificial Sequence
  n-mer motif
HMSSYSS

SEQ ID NO: 4481 - protein, 7 aa, Artificial Sequence
  n-mer motif
NVPNGQG

SEQ ID NO: 4482 - protein, 7 aa, Artificial Sequence
  n-mer motif
NGPTGSA

SEQ ID NO: 4483 - protein, 7 aa, Artificial Sequence
  n-mer motif
KSNAGFG

SEQ ID NO: 4484 - protein, 7 aa, Artificial Sequence
  n-mer motif
AAALETI

SEQ ID NO: 4485 - protein, 7 aa, Artificial Sequence
  n-mer motif
NRQRDFE

SEQ ID NO: 4486 - protein, 7 aa, Artificial Sequence
  n-mer motif
GSGNEPG

SEQ ID NO: 4487 - protein, 7 aa, Artificial Sequence
  n-mer motif
VSVAVPA

SEQ ID NO: 4488 - protein, 7 aa, Artificial Sequence
  n-mer motif
HSNTHYE

SEQ ID NO: 4489 - protein, 7 aa, Artificial Sequence
  n-mer motif
PDRANDK

SEQ ID NO: 4490 - protein, 7 aa, Artificial Sequence
  n-mer motif
QVGALMV

SEQ ID NO: 4491 - protein, 7 aa, Artificial Sequence
  n-mer motif
LTPQGTS

SEQ ID NO: 4492 - protein, 7 aa, Artificial Sequence
  n-mer motif
LYDGKHV

SEQ ID NO: 4493 - protein, 7 aa, Artificial Sequence
  n-mer motif
LTESVRN

SEQ ID NO: 4494 - protein, 7 aa, Artificial Sequence
  n-mer motif
STYGNTY

SEQ ID NO: 4495 - protein, 7 aa, Artificial Sequence
  n-mer motif
NAISTNN

SEQ ID NO: 4496 - protein, 7 aa, Artificial Sequence
  n-mer motif
IAHVSTN

SEQ ID NO: 4497 - protein, 7 aa, Artificial Sequence
  n-mer motif
SEERTRA

SEQ ID NO: 4498 - protein, 7 aa, Artificial Sequence
  n-mer motif
RWSENNS

SEQ ID NO: 4499 - protein, 7 aa, Artificial Sequence
  n-mer motif
DGNNTTY

SEQ ID NO: 4500 - protein, 7 aa, Artificial Sequence
  n-mer motif
VTTVDSA

SEQ ID NO: 4501 - protein, 7 aa, Artificial Sequence
  n-mer motif
TVKQTSP

SEQ ID NO: 4502 - protein, 7 aa, Artificial Sequence
  n-mer motif
SIYLAST

SEQ ID NO: 4503 - protein, 7 aa, Artificial Sequence
  n-mer motif
TTRNEHS

SEQ ID NO: 4504 - protein, 7 aa, Artificial Sequence
  n-mer motif
SYDMHTN

SEQ ID NO: 4505 - protein, 7 aa, Artificial Sequence
  n-mer motif
VSTYLLA

SEQ ID NO: 4506 - protein, 7 aa, Artificial Sequence
  n-mer motif
GEQSHNQ

SEQ ID NO: 4507 - protein, 7 aa, Artificial Sequence
  n-mer motif
TANNHSP

SEQ ID NO: 4508 - protein, 7 aa, Artificial Sequence
  n-mer motif
QFHGTSE

SEQ ID NO: 4509 - protein, 7 aa, Artificial Sequence
  n-mer motif
NVLGASS

SEQ ID NO: 4510 - protein, 7 aa, Artificial Sequence
  n-mer motif
RDSTISR

SEQ ID NO: 4511 - protein, 7 aa, Artificial Sequence
  n-mer motif
VIGTSRD

SEQ ID NO: 4512 - protein, 7 aa, Artificial Sequence
  n-mer motif
NYEKEFV

SEQ ID NO: 4513 - protein, 7 aa, Artificial Sequence
  n-mer motif
MDQSHSR

SEQ ID NO: 4514 - protein, 7 aa, Artificial Sequence
  n-mer motif
NSQNPQG

SEQ ID NO: 4515 - protein, 7 aa, Artificial Sequence
  n-mer motif
HTGTDNR

SEQ ID NO: 4516 - protein, 7 aa, Artificial Sequence
  n-mer motif
YNTVDQR

SEQ ID NO: 4517 - protein, 7 aa, Artificial Sequence
  n-mer motif
KESLEDV

SEQ ID NO: 4518 - protein, 7 aa, Artificial Sequence
  n-mer motif
TANSTYV

SEQ ID NO: 4519 - protein, 7 aa, Artificial Sequence
  n-mer motif
YLNSTQI

SEQ ID NO: 4520 - protein, 7 aa, Artificial Sequence
  n-mer motif
RVEDTNS

SEQ ID NO: 4521 - protein, 7 aa, Artificial Sequence
  n-mer motif
NDARNRA

SEQ ID NO: 4522 - protein, 7 aa, Artificial Sequence
  n-mer motif
NTNNQEQ

SEQ ID NO: 4523 - protein, 7 aa, Artificial Sequence
  n-mer motif
TVGSNSI

SEQ ID NO: 4524 - protein, 7 aa, Artificial Sequence
  n-mer motif
YGERART

SEQ ID NO: 4525 - protein, 7 aa, Artificial Sequence
  n-mer motif
PTGGSPP

SEQ ID NO: 4526 - protein, 7 aa, Artificial Sequence
  n-mer motif
LGQVNST

SEQ ID NO: 4527 - protein, 7 aa, Artificial Sequence
  n-mer motif
VSGPVSV

SEQ ID NO: 4528 - protein, 7 aa, Artificial Sequence
  n-mer motif
GTNHDFS

SEQ ID NO: 4529 - protein, 7 aa, Artificial Sequence
  n-mer motif
KTLDNNA

SEQ ID NO: 4530 - protein, 7 aa, Artificial Sequence
  n-mer motif
HSELRQN

SEQ ID NO: 4531 - protein, 7 aa, Artificial Sequence
  n-mer motif
EKNLTNA

SEQ ID NO: 4532 - protein, 7 aa, Artificial Sequence
  n-mer motif
TGLGGNS

SEQ ID NO: 4533 - protein, 7 aa, Artificial Sequence
  n-mer motif
KDHILSL

SEQ ID NO: 4534 - protein, 7 aa, Artificial Sequence
  n-mer motif
ITTGGVL

SEQ ID NO: 4535 - protein, 7 aa, Artificial Sequence
  n-mer motif
LADSNSK

SEQ ID NO: 4536 - protein, 7 aa, Artificial Sequence
  n-mer motif
SISDKNQ

SEQ ID NO: 4537 - protein, 7 aa, Artificial Sequence
  n-mer motif
YIAGGEQ

SEQ ID NO: 4538 - protein, 7 aa, Artificial Sequence
  n-mer motif
LPDKGRI

SEQ ID NO: 4539 - protein, 7 aa, Artificial Sequence
  n-mer motif
LIQTQGT

SEQ ID NO: 4540 - protein, 7 aa, Artificial Sequence
  n-mer motif
YSGELNK

SEQ ID NO: 4541 - protein, 7 aa, Artificial Sequence
  n-mer motif
CASEVCQ

SEQ ID NO: 4542 - protein, 7 aa, Artificial Sequence
  n-mer motif
LMAANTA

SEQ ID NO: 4543 - protein, 7 aa, Artificial Sequence
  n-mer motif
HQSFDAG

SEQ ID NO: 4544 - protein, 7 aa, Artificial Sequence
  n-mer motif
GETLRSQ

SEQ ID NO: 4545 - protein, 7 aa, Artificial Sequence
  n-mer motif
QTDGPNF

SEQ ID NO: 4546 - protein, 7 aa, Artificial Sequence
  n-mer motif
TTTNVNF

SEQ ID NO: 4547 - protein, 7 aa, Artificial Sequence
  n-mer motif
NMTNENG

SEQ ID NO: 4548 - protein, 7 aa, Artificial Sequence
  n-mer motif
GYSPSTP

SEQ ID NO: 4549 - protein, 7 aa, Artificial Sequence
  n-mer motif
LQVTVHN

SEQ ID NO: 4550 - protein, 7 aa, Artificial Sequence
  n-mer motif
DLTHVHR

SEQ ID NO: 4551 - protein, 7 aa, Artificial Sequence
  n-mer motif
TELSEYT

SEQ ID NO: 4552 - protein, 7 aa, Artificial Sequence
  n-mer motif
MTVASTS

SEQ ID NO: 4553 - protein, 7 aa, Artificial Sequence
  n-mer motif
SSQAHGP

SEQ ID NO: 4554 - protein, 7 aa, Artificial Sequence
  n-mer motif
TRSPNED

SEQ ID NO: 4555 - protein, 7 aa, Artificial Sequence
  n-mer motif
DNNKHGT

SEQ ID NO: 4556 - protein, 7 aa, Artificial Sequence
  n-mer motif
REIVHSN

SEQ ID NO: 4557 - protein, 7 aa, Artificial Sequence
  n-mer motif
RKLELDL

SEQ ID NO: 4558 - protein, 7 aa, Artificial Sequence
  n-mer motif
IYETVTL

SEQ ID NO: 4559 - protein, 7 aa, Artificial Sequence
  n-mer motif
NSGSTSF

SEQ ID NO: 4560 - protein, 7 aa, Artificial Sequence
  n-mer motif
PSTNESR

SEQ ID NO: 4561 - protein, 7 aa, Artificial Sequence
  n-mer motif
QADLRYK

SEQ ID NO: 4562 - protein, 7 aa, Artificial Sequence
  n-mer motif
DQPGYVR

SEQ ID NO: 4563 - protein, 7 aa, Artificial Sequence
  n-mer motif
DAMLAHP

SEQ ID NO: 4564 - protein, 7 aa, Artificial Sequence
  n-mer motif
TRHDGST

SEQ ID NO: 4565 - protein, 7 aa, Artificial Sequence
  n-mer motif
LANMSAP

SEQ ID NO: 4566 - protein, 7 aa, Artificial Sequence
  n-mer motif
TGHPPAA

SEQ ID NO: 4567 - protein, 7 aa, Artificial Sequence
  n-mer motif
SSISLRY

SEQ ID NO: 4568 - protein, 7 aa, Artificial Sequence
  n-mer motif
MHVDKTS

SEQ ID NO: 4569 - protein, 7 aa, Artificial Sequence
  n-mer motif
GSDSKHP

SEQ ID NO: 4570 - protein, 7 aa, Artificial Sequence
  n-mer motif
GESSSIS

SEQ ID NO: 4571 - protein, 7 aa, Artificial Sequence
  n-mer motif
VVHSHSE

SEQ ID NO: 4572 - protein, 7 aa, Artificial Sequence
  n-mer motif
SVRAHVL

SEQ ID NO: 4573 - protein, 7 aa, Artificial Sequence
  n-mer motif
ADGAKSA

SEQ ID NO: 4574 - protein, 7 aa, Artificial Sequence
  n-mer motif
GEARREA

SEQ ID NO: 4575 - protein, 7 aa, Artificial Sequence
  n-mer motif
FNATVVH

SEQ ID NO: 4576 - protein, 7 aa, Artificial Sequence
  n-mer motif
WTEGGSG

SEQ ID NO: 4577 - protein, 7 aa, Artificial Sequence
  n-mer motif
DSSYTHP

SEQ ID NO: 4578 - protein, 7 aa, Artificial Sequence
  n-mer motif
FPSRDNV

SEQ ID NO: 4579 - protein, 7 aa, Artificial Sequence
  n-mer motif
AITHIGT

SEQ ID NO: 4580 - protein, 7 aa, Artificial Sequence
  n-mer motif
AFKSGSI

SEQ ID NO: 4581 - protein, 7 aa, Artificial Sequence
  n-mer motif
MSNASYI

SEQ ID NO: 4582 - protein, 7 aa, Artificial Sequence
  n-mer motif
AERNDRT

SEQ ID NO: 4583 - protein, 7 aa, Artificial Sequence
  n-mer motif
TLETTRS

SEQ ID NO: 4584 - protein, 7 aa, Artificial Sequence
  n-mer motif
RLHGSDS

SEQ ID NO: 4585 - protein, 7 aa, Artificial Sequence
  n-mer motif
YEGHMNT

SEQ ID NO: 4586 - protein, 7 aa, Artificial Sequence
  n-mer motif
SVTTNLM

SEQ ID NO: 4587 - protein, 7 aa, Artificial Sequence
  n-mer motif
LRDQTSM

SEQ ID NO: 4588 - protein, 7 aa, Artificial Sequence
  n-mer motif
PASHSAG

SEQ ID NO: 4589 - protein, 7 aa, Artificial Sequence
  n-mer motif
VVENLRQ

SEQ ID NO: 4590 - protein, 7 aa, Artificial Sequence
  n-mer motif
QQSQNSI

SEQ ID NO: 4591 - protein, 7 aa, Artificial Sequence
  n-mer motif
LVDTDRN

SEQ ID NO: 4592 - protein, 7 aa, Artificial Sequence
  n-mer motif
NEMGNYV

SEQ ID NO: 4593 - protein, 7 aa, Artificial Sequence
  n-mer motif
STDPRYS

SEQ ID NO: 4594 - protein, 7 aa, Artificial Sequence
  n-mer motif
TNGIYQP

SEQ ID NO: 4595 - protein, 7 aa, Artificial Sequence
  n-mer motif
WVNSVGN

SEQ ID NO: 4596 - protein, 7 aa, Artificial Sequence
  n-mer motif
GVSNNSS

SEQ ID NO: 4597 - protein, 7 aa, Artificial Sequence
  n-mer motif
NVNAQSR

SEQ ID NO: 4598 - protein, 7 aa, Artificial Sequence
  n-mer motif
TTPPFSN

SEQ ID NO: 4599 - protein, 7 aa, Artificial Sequence
  n-mer motif
TGSSHTN

SEQ ID NO: 4600 - protein, 7 aa, Artificial Sequence
  n-mer motif
YVDKSMT

SEQ ID NO: 4601 - protein, 7 aa, Artificial Sequence
  n-mer motif
LIKNNML

SEQ ID NO: 4602 - protein, 7 aa, Artificial Sequence
  n-mer motif
GGTGLSK

SEQ ID NO: 4603 - protein, 7 aa, Artificial Sequence
  n-mer motif
ALHNLMN

SEQ ID NO: 4604 - protein, 7 aa, Artificial Sequence
  n-mer motif
VHVTNVL

SEQ ID NO: 4605 - protein, 7 aa, Artificial Sequence
  n-mer motif
STTHPSE

SEQ ID NO: 4606 - protein, 7 aa, Artificial Sequence
  n-mer motif
SVGSPTH

SEQ ID NO: 4607 - protein, 7 aa, Artificial Sequence
  n-mer motif
MSNDLPG

SEQ ID NO: 4608 - protein, 7 aa, Artificial Sequence
  n-mer motif
FSSTEAR

SEQ ID NO: 4609 - protein, 7 aa, Artificial Sequence
  n-mer motif
AGHQQLA

SEQ ID NO: 4610 - protein, 7 aa, Artificial Sequence
  n-mer motif
GTILPNQ

SEQ ID NO: 4611 - protein, 7 aa, Artificial Sequence
  n-mer motif
SAVSGSS

SEQ ID NO: 4612 - protein, 7 aa, Artificial Sequence
  n-mer motif
EVSRDGL

SEQ ID NO: 4613 - protein, 7 aa, Artificial Sequence
  n-mer motif
QSLKDGT

SEQ ID NO: 4614 - protein, 7 aa, Artificial Sequence
  n-mer motif
TREGNHA

SEQ ID NO: 4615 - protein, 7 aa, Artificial Sequence
  n-mer motif
VATQNLL

SEQ ID NO: 4616 - protein, 7 aa, Artificial Sequence
  n-mer motif
AEMTHRL

SEQ ID NO: 4617 - protein, 7 aa, Artificial Sequence
  n-mer motif
QRPDPLK

SEQ ID NO: 4618 - protein, 7 aa, Artificial Sequence
  n-mer motif
EHISSYG

SEQ ID NO: 4619 - protein, 7 aa, Artificial Sequence
  n-mer motif
QKSNDQN

SEQ ID NO: 4620 - protein, 7 aa, Artificial Sequence
  n-mer motif
NLVMSGT

SEQ ID NO: 4621 - protein, 7 aa, Artificial Sequence
  n-mer motif
GAGQSHV

SEQ ID NO: 4622 - protein, 7 aa, Artificial Sequence
  n-mer motif
LNHTMPL

SEQ ID NO: 4623 - protein, 7 aa, Artificial Sequence
  n-mer motif
VSQSHDV

SEQ ID NO: 4624 - protein, 7 aa, Artificial Sequence
  n-mer motif
ANSATNQ

SEQ ID NO: 4625 - protein, 7 aa, Artificial Sequence
  n-mer motif
GTGGNRE

SEQ ID NO: 4626 - protein, 7 aa, Artificial Sequence
  n-mer motif
AKSSIIL

SEQ ID NO: 4627 - protein, 7 aa, Artificial Sequence
  n-mer motif
GGTALGS

SEQ ID NO: 4628 - protein, 7 aa, Artificial Sequence
  n-mer motif
NKVESDP

SEQ ID NO: 4629 - protein, 7 aa, Artificial Sequence
  n-mer motif
NSKQPDV

SEQ ID NO: 4630 - protein, 7 aa, Artificial Sequence
  n-mer motif
SYADRRL

SEQ ID NO: 4631 - protein, 7 aa, Artificial Sequence
  n-mer motif
NVNPNGP

SEQ ID NO: 4632 - protein, 7 aa, Artificial Sequence
  n-mer motif
EHNSKTY

SEQ ID NO: 4633 - protein, 7 aa, Artificial Sequence
  n-mer motif
TQGSNTT

SEQ ID NO: 4634 - protein, 7 aa, Artificial Sequence
  n-mer motif
SNVSAYA

SEQ ID NO: 4635 - protein, 7 aa, Artificial Sequence
  n-mer motif
AYSDSAR

SEQ ID NO: 4636 - protein, 7 aa, Artificial Sequence
  n-mer motif
GSQYANR

SEQ ID NO: 4637 - protein, 7 aa, Artificial Sequence
  n-mer motif
TMSVTLE

SEQ ID NO: 4638 - protein, 7 aa, Artificial Sequence
  n-mer motif
QTTILAA

SEQ ID NO: 4639 - protein, 7 aa, Artificial Sequence
  n-mer motif
LLQSIVV

SEQ ID NO: 4640 - protein, 7 aa, Artificial Sequence
  n-mer motif
VHANATL

SEQ ID NO: 4641 - protein, 7 aa, Artificial Sequence
  n-mer motif
NKTNADY

SEQ ID NO: 4642 - protein, 7 aa, Artificial Sequence
  n-mer motif
NYDTGAK

SEQ ID NO: 4643 - protein, 7 aa, Artificial Sequence
  n-mer motif
VYHNRDV

SEQ ID NO: 4644 - protein, 7 aa, Artificial Sequence
  n-mer motif
DSAPRSI

SEQ ID NO: 4645 - protein, 7 aa, Artificial Sequence
  n-mer motif
LIANLSN

SEQ ID NO: 4646 - protein, 7 aa, Artificial Sequence
  n-mer motif
PQDVRQT

SEQ ID NO: 4647 - protein, 7 aa, Artificial Sequence
  n-mer motif
TMTAIAM

SEQ ID NO: 4648 - protein, 7 aa, Artificial Sequence
  n-mer motif
TYASTEA

SEQ ID NO: 4649 - protein, 7 aa, Artificial Sequence
  n-mer motif
PHANGVT

SEQ ID NO: 4650 - protein, 7 aa, Artificial Sequence
  n-mer motif
RADVSWS

SEQ ID NO: 4651 - protein, 7 aa, Artificial Sequence
  n-mer motif
LTHMTGT

SEQ ID NO: 4652 - protein, 7 aa, Artificial Sequence
  n-mer motif
ANDSAKT

SEQ ID NO: 4653 - protein, 7 aa, Artificial Sequence
  n-mer motif
ANSGLHN

SEQ ID NO: 4654 - protein, 7 aa, Artificial Sequence
  n-mer motif
NVGTDRD

SEQ ID NO: 4655 - protein, 7 aa, Artificial Sequence
  n-mer motif
VGTTSNG

SEQ ID NO: 4656 - protein, 7 aa, Artificial Sequence
  n-mer motif
GVLGILV

SEQ ID NO: 4657 - protein, 7 aa, Artificial Sequence
  n-mer motif
RINAAID

SEQ ID NO: 4658 - protein, 7 aa, Artificial Sequence
  n-mer motif
PDTRPSI

SEQ ID NO: 4659 - protein, 7 aa, Artificial Sequence
  n-mer motif
GESRTNM

SEQ ID NO: 4660 - protein, 7 aa, Artificial Sequence
  n-mer motif
ILLAQSA

SEQ ID NO: 4661 - protein, 7 aa, Artificial Sequence
  n-mer motif
YNRDNGS

SEQ ID NO: 4662 - protein, 7 aa, Artificial Sequence
  n-mer motif
WNSPGEA

SEQ ID NO: 4663 - protein, 7 aa, Artificial Sequence
  n-mer motif
LLGAHQP

SEQ ID NO: 4664 - protein, 7 aa, Artificial Sequence
  n-mer motif
IGKDSVP

SEQ ID NO: 4665 - protein, 7 aa, Artificial Sequence
  n-mer motif
TRESLVD

SEQ ID NO: 4666 - protein, 7 aa, Artificial Sequence
  n-mer motif
ASNHLQA

SEQ ID NO: 4667 - protein, 7 aa, Artificial Sequence
  n-mer motif
NLQTGKA

SEQ ID NO: 4668 - protein, 7 aa, Artificial Sequence
  n-mer motif
TVGSSYA

SEQ ID NO: 4669 - protein, 7 aa, Artificial Sequence
  n-mer motif
DTNGIKS

SEQ ID NO: 4670 - protein, 7 aa, Artificial Sequence
  n-mer motif
SLRMENS

SEQ ID NO: 4671 - protein, 7 aa, Artificial Sequence
  n-mer motif
TKGNNLV

SEQ ID NO: 4672 - protein, 7 aa, Artificial Sequence
  n-mer motif
HTNQMQP

SEQ ID NO: 4673 - protein, 7 aa, Artificial Sequence
  n-mer motif
NGNYDGA

SEQ ID NO: 4674 - protein, 7 aa, Artificial Sequence
  n-mer motif
EAHNRGN

SEQ ID NO: 4675 - protein, 7 aa, Artificial Sequence
  n-mer motif
GTVNSSA

SEQ ID NO: 4676 - protein, 7 aa, Artificial Sequence
  n-mer motif
GPTMNHN

SEQ ID NO: 4677 - protein, 7 aa, Artificial Sequence
  n-mer motif
VPNNNTS

SEQ ID NO: 4678 - protein, 7 aa, Artificial Sequence
  n-mer motif
VSNKSGS

SEQ ID NO: 4679 - protein, 7 aa, Artificial Sequence
  n-mer motif
WGVSNSA

SEQ ID NO: 4680 - protein, 7 aa, Artificial Sequence
  n-mer motif
VSNVLYS

SEQ ID NO: 4681 - protein, 7 aa, Artificial Sequence
  n-mer motif
AGQNSVG

SEQ ID NO: 4682 - protein, 7 aa, Artificial Sequence
  n-mer motif
GTSLENR

SEQ ID NO: 4683 - protein, 7 aa, Artificial Sequence
  n-mer motif
QMNIHDK

SEQ ID NO: 4684 - protein, 7 aa, Artificial Sequence
  n-mer motif
PQLSGTA

SEQ ID NO: 4685 - protein, 7 aa, Artificial Sequence
  n-mer motif
SSTPQDT

SEQ ID NO: 4686 - protein, 7 aa, Artificial Sequence
  n-mer motif
VQGQTGW

SEQ ID NO: 4687 - protein, 7 aa, Artificial Sequence
  n-mer motif
GLTGDLV

SEQ ID NO: 4688 - protein, 7 aa, Artificial Sequence
  n-mer motif
NHPAPSS

SEQ ID NO: 4689 - protein, 7 aa, Artificial Sequence
  n-mer motif
KEKTTRE

SEQ ID NO: 4690 - protein, 7 aa, Artificial Sequence
  n-mer motif
TTNPQTQ

SEQ ID NO: 4691 - protein, 7 aa, Artificial Sequence
  n-mer motif
GGEHARN

SEQ ID NO: 4692 - protein, 7 aa, Artificial Sequence
  n-mer motif
TTEAVVA

SEQ ID NO: 4693 - protein, 7 aa, Artificial Sequence
  n-mer motif
QNSDLAS

SEQ ID NO: 4694 - protein, 7 aa, Artificial Sequence
  n-mer motif
YSTEARV

SEQ ID NO: 4695 - protein, 7 aa, Artificial Sequence
  n-mer motif
TGQAGGS

SEQ ID NO: 4696 - protein, 7 aa, Artificial Sequence
  n-mer motif
TSSNLYV

SEQ ID NO: 4697 - protein, 7 aa, Artificial Sequence
  n-mer motif
TARAIDM

SEQ ID NO: 4698 - protein, 7 aa, Artificial Sequence
  n-mer motif
QESNRGV

SEQ ID NO: 4699 - protein, 7 aa, Artificial Sequence
  n-mer motif
SIGFSVG

SEQ ID NO: 4700 - protein, 7 aa, Artificial Sequence
  n-mer motif
ERSTHNV

SEQ ID NO: 4701 - protein, 7 aa, Artificial Sequence
  n-mer motif
ANHDNIV

SEQ ID NO: 4702 - protein, 7 aa, Artificial Sequence
  n-mer motif
WAMNNVP

SEQ ID NO: 4703 - protein, 7 aa, Artificial Sequence
  n-mer motif
YIAAGEQ

SEQ ID NO: 4704 - protein, 7 aa, Artificial Sequence
  n-mer motif
SSNTSGS

SEQ ID NO: 4705 - protein, 7 aa, Artificial Sequence
  n-mer motif
MGKHEGL

SEQ ID NO: 4706 - protein, 7 aa, Artificial Sequence
  n-mer motif
VLTHLPT

SEQ ID NO: 4707 - protein, 7 aa, Artificial Sequence
  n-mer motif
EMGNQYP

SEQ ID NO: 4708 - protein, 7 aa, Artificial Sequence
  n-mer motif
SLRPTLP

SEQ ID NO: 4709 - protein, 7 aa, Artificial Sequence
  n-mer motif
SANLYKQ

SEQ ID NO: 4710 - protein, 7 aa, Artificial Sequence
  n-mer motif
QNDRKPD

SEQ ID NO: 4711 - protein, 7 aa, Artificial Sequence
  n-mer motif
IISGITV

SEQ ID NO: 4712 - protein, 7 aa, Artificial Sequence
  n-mer motif
PSEMRAV

SEQ ID NO: 4713 - protein, 7 aa, Artificial Sequence
  n-mer motif
LVTQTPN

SEQ ID NO: 4714 - protein, 7 aa, Artificial Sequence
  n-mer motif
IAQNETY

SEQ ID NO: 4715 - protein, 7 aa, Artificial Sequence
  n-mer motif
PYLRNMA

SEQ ID NO: 4716 - protein, 7 aa, Artificial Sequence
  n-mer motif
GVNTKIE

SEQ ID NO: 4717 - protein, 7 aa, Artificial Sequence
  n-mer motif
YSSEMSE

SEQ ID NO: 4718 - protein, 7 aa, Artificial Sequence
  n-mer motif
LENPTPA

SEQ ID NO: 4719 - protein, 7 aa, Artificial Sequence
  n-mer motif
GVMSNAT

SEQ ID NO: 4720 - protein, 7 aa, Artificial Sequence
  n-mer motif
AHTALAG

SEQ ID NO: 4721 - protein, 7 aa, Artificial Sequence
  n-mer motif
PVVRDRS

SEQ ID NO: 4722 - protein, 7 aa, Artificial Sequence
  n-mer motif
SAGMVSL

SEQ ID NO: 4723 - protein, 7 aa, Artificial Sequence
  n-mer motif
SGVNSER

SEQ ID NO: 4724 - protein, 7 aa, Artificial Sequence
  n-mer motif
NGDVTNM

SEQ ID NO: 4725 - protein, 7 aa, Artificial Sequence
  n-mer motif
SVVPTDK

SEQ ID NO: 4726 - protein, 7 aa, Artificial Sequence
  n-mer motif
SKGDQLN

SEQ ID NO: 4727 - protein, 7 aa, Artificial Sequence
  n-mer motif
DGESRLS

SEQ ID NO: 4728 - protein, 7 aa, Artificial Sequence
  n-mer motif
GNMNHSI

SEQ ID NO: 4729 - protein, 7 aa, Artificial Sequence
  n-mer motif
SGHASQG

SEQ ID NO: 4730 - protein, 7 aa, Artificial Sequence
  n-mer motif
GWSNNEL

SEQ ID NO: 4731 - protein, 7 aa, Artificial Sequence
  n-mer motif
GVHTHTV

SEQ ID NO: 4732 - protein, 7 aa, Artificial Sequence
  n-mer motif
HVTVTLN

SEQ ID NO: 4733 - protein, 7 aa, Artificial Sequence
  n-mer motif
TRGNDIS

SEQ ID NO: 4734 - protein, 7 aa, Artificial Sequence
  n-mer motif
SKGGDMV

SEQ ID NO: 4735 - protein, 7 aa, Artificial Sequence
  n-mer motif
THGDHIQ

SEQ ID NO: 4736 - protein, 7 aa, Artificial Sequence
  n-mer motif
TTNSHAI

SEQ ID NO: 4737 - protein, 7 aa, Artificial Sequence
  n-mer motif
VRTVLQQ

SEQ ID NO: 4738 - protein, 7 aa, Artificial Sequence
  n-mer motif
TVRSPQP

SEQ ID NO: 4739 - protein, 7 aa, Artificial Sequence
  n-mer motif
NTYTAGK

SEQ ID NO: 4740 - protein, 7 aa, Artificial Sequence
  n-mer motif
ISNPENT

SEQ ID NO: 4741 - protein, 7 aa, Artificial Sequence
  n-mer motif
IGSPLAN

SEQ ID NO: 4742 - protein, 7 aa, Artificial Sequence
  n-mer motif
YTGTLVV

SEQ ID NO: 4743 - protein, 7 aa, Artificial Sequence
  n-mer motif
GRHTLAD

SEQ ID NO: 4744 - protein, 7 aa, Artificial Sequence
  n-mer motif
TDGPRLA

SEQ ID NO: 4745 - protein, 7 aa, Artificial Sequence
  n-mer motif
GAGNLGT

SEQ ID NO: 4746 - protein, 7 aa, Artificial Sequence
  n-mer motif
LMNRNAP

SEQ ID NO: 4747 - protein, 7 aa, Artificial Sequence
  n-mer motif
NAMASSR

SEQ ID NO: 4748 - protein, 7 aa, Artificial Sequence
  n-mer motif
QHRAQDV

SEQ ID NO: 4749 - protein, 7 aa, Artificial Sequence
  n-mer motif
KIESGTI

SEQ ID NO: 4750 - protein, 7 aa, Artificial Sequence
  n-mer motif
TNYPEAN

SEQ ID NO: 4751 - protein, 7 aa, Artificial Sequence
  n-mer motif
VYHGVAS

SEQ ID NO: 4752 - protein, 7 aa, Artificial Sequence
  n-mer motif
SNVHVVN

SEQ ID NO: 4753 - protein, 7 aa, Artificial Sequence
  n-mer motif
TYTDGNP

SEQ ID NO: 4754 - protein, 7 aa, Artificial Sequence
  n-mer motif
FIANTNP

SEQ ID NO: 4755 - protein, 7 aa, Artificial Sequence
  n-mer motif
DAGYGHD

SEQ ID NO: 4756 - protein, 7 aa, Artificial Sequence
  n-mer motif
GLSRNDG

SEQ ID NO: 4757 - protein, 7 aa, Artificial Sequence
  n-mer motif
MMGATTK

SEQ ID NO: 4758 - protein, 7 aa, Artificial Sequence
  n-mer motif
PINVLTT

SEQ ID NO: 4759 - protein, 7 aa, Artificial Sequence
  n-mer motif
AVDQSRL

SEQ ID NO: 4760 - protein, 7 aa, Artificial Sequence
  n-mer motif
NASTYMD

SEQ ID NO: 4761 - protein, 7 aa, Artificial Sequence
  n-mer motif
TQAGLAS

SEQ ID NO: 4762 - protein, 7 aa, Artificial Sequence
  n-mer motif
AQFESGR

SEQ ID NO: 4763 - protein, 7 aa, Artificial Sequence
  n-mer motif
RNGGTTD

SEQ ID NO: 4764 - protein, 7 aa, Artificial Sequence
  n-mer motif
ANTYNVQ

SEQ ID NO: 4765 - protein, 7 aa, Artificial Sequence
  n-mer motif
SGVHSER

SEQ ID NO: 4766 - protein, 7 aa, Artificial Sequence
  n-mer motif
NTGTTSV

SEQ ID NO: 4767 - protein, 7 aa, Artificial Sequence
  n-mer motif
STSNSHM

SEQ ID NO: 4768 - protein, 7 aa, Artificial Sequence
  n-mer motif
GEQHNAP

SEQ ID NO: 4769 - protein, 7 aa, Artificial Sequence
  n-mer motif
AHHMTTE

SEQ ID NO: 4770 - protein, 7 aa, Artificial Sequence
  n-mer motif
LMTGTAS

SEQ ID NO: 4771 - protein, 7 aa, Artificial Sequence
  n-mer motif
AAGADSP

SEQ ID NO: 4772 - protein, 7 aa, Artificial Sequence
  n-mer motif
VSLSSPP

SEQ ID NO: 4773 - protein, 7 aa, Artificial Sequence
  n-mer motif
RVVAGPN

SEQ ID NO: 4774 - protein, 7 aa, Artificial Sequence
  n-mer motif
DKTEMLQ

SEQ ID NO: 4775 - protein, 7 aa, Artificial Sequence
  n-mer motif
ARDDTIQ

SEQ ID NO: 4776 - protein, 7 aa, Artificial Sequence
  n-mer motif
LHLGLSS

SEQ ID NO: 4777 - protein, 7 aa, Artificial Sequence
  n-mer motif
LEGQRDV

SEQ ID NO: 4778 - protein, 7 aa, Artificial Sequence
  n-mer motif
ASLSAPA

SEQ ID NO: 4779 - protein, 7 aa, Artificial Sequence
  n-mer motif
SNPGNHN

SEQ ID NO: 4780 - protein, 7 aa, Artificial Sequence
  n-mer motif
GLNSKGT

SEQ ID NO: 4781 - protein, 7 aa, Artificial Sequence
  n-mer motif
KTPSASE

SEQ ID NO: 4782 - protein, 7 aa, Artificial Sequence
  n-mer motif
VLASTEK

SEQ ID NO: 4783 - protein, 7 aa, Artificial Sequence
  n-mer motif
SVLNKPT

SEQ ID NO: 4784 - protein, 7 aa, Artificial Sequence
  n-mer motif
PGNGQSP

SEQ ID NO: 4785 - protein, 7 aa, Artificial Sequence
  n-mer motif
ILMGART

SEQ ID NO: 4786 - protein, 7 aa, Artificial Sequence
  n-mer motif
ALPSHSS

SEQ ID NO: 4787 - protein, 7 aa, Artificial Sequence
  n-mer motif
RDQTHPN

SEQ ID NO: 4788 - protein, 7 aa, Artificial Sequence
  n-mer motif
SGPIPAV

SEQ ID NO: 4789 - protein, 7 aa, Artificial Sequence
  n-mer motif
YVDDNSR

SEQ ID NO: 4790 - protein, 7 aa, Artificial Sequence
  n-mer motif
LTRGVAA

SEQ ID NO: 4791 - protein, 7 aa, Artificial Sequence
  n-mer motif
SEKEARL

SEQ ID NO: 4792 - protein, 7 aa, Artificial Sequence
  n-mer motif
STTPPFK

SEQ ID NO: 4793 - protein, 7 aa, Artificial Sequence
  n-mer motif
YSTTMLN

SEQ ID NO: 4794 - protein, 7 aa, Artificial Sequence
  n-mer motif
KNGVIND

SEQ ID NO: 4795 - protein, 7 aa, Artificial Sequence
  n-mer motif
FGIGHGT

SEQ ID NO: 4796 - protein, 7 aa, Artificial Sequence
  n-mer motif
PLHVASP

SEQ ID NO: 4797 - protein, 7 aa, Artificial Sequence
  n-mer motif
LGNGSSL

SEQ ID NO: 4798 - protein, 7 aa, Artificial Sequence
  n-mer motif
SGNANIV

SEQ ID NO: 4799 - protein, 7 aa, Artificial Sequence
  n-mer motif
GINRTSE

SEQ ID NO: 4800 - protein, 7 aa, Artificial Sequence
  n-mer motif
SDNRNTA

SEQ ID NO: 4801 - protein, 7 aa, Artificial Sequence
  n-mer motif
RLGTVTN

SEQ ID NO: 4802 - protein, 7 aa, Artificial Sequence
  n-mer motif
VEHVAHQ

SEQ ID NO: 4803 - protein, 7 aa, Artificial Sequence
  n-mer motif
YTKHPVE

SEQ ID NO: 4804 - protein, 7 aa, Artificial Sequence
  n-mer motif
SRITVNA

SEQ ID NO: 4805 - protein, 7 aa, Artificial Sequence
  n-mer motif
TVSSYVQ

SEQ ID NO: 4806 - protein, 7 aa, Artificial Sequence
  n-mer motif
RAEGSSG

SEQ ID NO: 4807 - protein, 7 aa, Artificial Sequence
  n-mer motif
AVGRSDD

SEQ ID NO: 4808 - protein, 7 aa, Artificial Sequence
  n-mer motif
RIGVGAP

SEQ ID NO: 4809 - protein, 7 aa, Artificial Sequence
  n-mer motif
YSNLVLS

SEQ ID NO: 4810 - protein, 7 aa, Artificial Sequence
  n-mer motif
STNSEAV

SEQ ID NO: 4811 - protein, 7 aa, Artificial Sequence
  n-mer motif
AMSTHMI

SEQ ID NO: 4812 - protein, 7 aa, Artificial Sequence
  n-mer motif
RVDISHF

SEQ ID NO: 4813 - protein, 7 aa, Artificial Sequence
  n-mer motif
ILTPLDK

SEQ ID NO: 4814 - protein, 7 aa, Artificial Sequence
  n-mer motif
VASTTQT

SEQ ID NO: 4815 - protein, 7 aa, Artificial Sequence
  n-mer motif
DRSSATL

SEQ ID NO: 4816 - protein, 7 aa, Artificial Sequence
  n-mer motif
DHSEQNS

SEQ ID NO: 4817 - protein, 7 aa, Artificial Sequence
  n-mer motif
IRSELEV

SEQ ID NO: 4818 - protein, 7 aa, Artificial Sequence
  n-mer motif
ANLGDVE

SEQ ID NO: 4819 - protein, 7 aa, Artificial Sequence
  n-mer motif
ELKESQK

SEQ ID NO: 4820 - protein, 7 aa, Artificial Sequence
  n-mer motif
SYTAGRP

SEQ ID NO: 4821 - protein, 7 aa, Artificial Sequence
  n-mer motif
GPAYNQS

SEQ ID NO: 4822 - protein, 7 aa, Artificial Sequence
  n-mer motif
HESHYVS

SEQ ID NO: 4823 - protein, 7 aa, Artificial Sequence
  n-mer motif
NGKLGTT

SEQ ID NO: 4824 - protein, 7 aa, Artificial Sequence
  n-mer motif
LPPASAG

SEQ ID NO: 4825 - protein, 7 aa, Artificial Sequence
  n-mer motif
LSYQTGH

SEQ ID NO: 4826 - protein, 7 aa, Artificial Sequence
  n-mer motif
DSQITRL

SEQ ID NO: 4827 - protein, 7 aa, Artificial Sequence
  n-mer motif
NVYEGHR

SEQ ID NO: 4828 - protein, 7 aa, Artificial Sequence
  n-mer motif
LFTAGST

SEQ ID NO: 4829 - protein, 7 aa, Artificial Sequence
  n-mer motif
LVNNDGT

SEQ ID NO: 4830 - protein, 7 aa, Artificial Sequence
  n-mer motif
AMNVRSD

SEQ ID NO: 4831 - protein, 7 aa, Artificial Sequence
  n-mer motif
ASLDRLP

SEQ ID NO: 4832 - protein, 7 aa, Artificial Sequence
  n-mer motif
GSRNGPT

SEQ ID NO: 4833 - protein, 7 aa, Artificial Sequence
  n-mer motif
MSDGHSK

SEQ ID NO: 4834 - protein, 7 aa, Artificial Sequence
  n-mer motif
SNRTEMP

SEQ ID NO: 4835 - protein, 7 aa, Artificial Sequence
  n-mer motif
NVVKNNT

SEQ ID NO: 4836 - protein, 7 aa, Artificial Sequence
  n-mer motif
VVDSTYP

SEQ ID NO: 4837 - protein, 7 aa, Artificial Sequence
  n-mer motif
VAGGTSE

SEQ ID NO: 4838 - protein, 7 aa, Artificial Sequence
  n-mer motif
RADMTPL

SEQ ID NO: 4839 - protein, 7 aa, Artificial Sequence
  n-mer motif
GHEQTDA

SEQ ID NO: 4840 - protein, 7 aa, Artificial Sequence
  n-mer motif
SALISVV

SEQ ID NO: 4841 - protein, 7 aa, Artificial Sequence
  n-mer motif
NSTTAQS

SEQ ID NO: 4842 - protein, 7 aa, Artificial Sequence
  n-mer motif
YGDLTTV

SEQ ID NO: 4843 - protein, 7 aa, Artificial Sequence
  n-mer motif
ARNDGQG

SEQ ID NO: 4844 - protein, 7 aa, Artificial Sequence
  n-mer motif
LNVSSSK

SEQ ID NO: 4845 - protein, 7 aa, Artificial Sequence
  n-mer motif
SGVSKER

SEQ ID NO: 4846 - protein, 7 aa, Artificial Sequence
  n-mer motif
NMEHTMA

SEQ ID NO: 4847 - protein, 7 aa, Artificial Sequence
  n-mer motif
ARPASSD

SEQ ID NO: 4848 - protein, 7 aa, Artificial Sequence
  n-mer motif
LREESAR

SEQ ID NO: 4849 - protein, 7 aa, Artificial Sequence
  n-mer motif
LANMSAP

SEQ ID NO: 4850 - protein, 7 aa, Artificial Sequence
  n-mer motif
NHTVEGR

SEQ ID NO: 4851 - protein, 7 aa, Artificial Sequence
  n-mer motif
PQHQHEH

SEQ ID NO: 4852 - protein, 7 aa, Artificial Sequence
  n-mer motif
NSSELKT

SEQ ID NO: 4853 - protein, 7 aa, Artificial Sequence
  n-mer motif
LVAERLP

SEQ ID NO: 4854 - protein, 7 aa, Artificial Sequence
  n-mer motif
NVMHSSS

SEQ ID NO: 4855 - protein, 7 aa, Artificial Sequence
  n-mer motif
ASDKGAN

SEQ ID NO: 4856 - protein, 7 aa, Artificial Sequence
  n-mer motif
SLDRKPP

SEQ ID NO: 4857 - protein, 7 aa, Artificial Sequence
  n-mer motif
TEHEKST

SEQ ID NO: 4858 - protein, 7 aa, Artificial Sequence
  n-mer motif
PHNQEMG

SEQ ID NO: 4859 - protein, 7 aa, Artificial Sequence
  n-mer motif
ESKTVVI

SEQ ID NO: 4860 - protein, 7 aa, Artificial Sequence
  n-mer motif
STGQNLK

SEQ ID NO: 4861 - protein, 7 aa, Artificial Sequence
  n-mer motif
VLHVSDV

SEQ ID NO: 4862 - protein, 7 aa, Artificial Sequence
  n-mer motif
PDAARSP

SEQ ID NO: 4863 - protein, 7 aa, Artificial Sequence
  n-mer motif
APRHAHP

SEQ ID NO: 4864 - protein, 7 aa, Artificial Sequence
  n-mer motif
HVNPTPA

SEQ ID NO: 4865 - protein, 7 aa, Artificial Sequence
  n-mer motif
LPNERPG

SEQ ID NO: 4866 - protein, 7 aa, Artificial Sequence
  n-mer motif
EAKGFGH

SEQ ID NO: 4867 - protein, 7 aa, Artificial Sequence
  n-mer motif
SENTSVP

SEQ ID NO: 4868 - protein, 7 aa, Artificial Sequence
  n-mer motif
GPGENYR

SEQ ID NO: 4869 - protein, 7 aa, Artificial Sequence
  n-mer motif
SHEMNNG

SEQ ID NO: 4870 - protein, 7 aa, Artificial Sequence
  n-mer motif
VDTYSGL

SEQ ID NO: 4871 - protein, 7 aa, Artificial Sequence
  n-mer motif
GVLGNMV

SEQ ID NO: 4872 - protein, 7 aa, Artificial Sequence
  n-mer motif
ALDNSSR

SEQ ID NO: 4873 - protein, 7 aa, Artificial Sequence
  n-mer motif
FLGSSNH

SEQ ID NO: 4874 - protein, 7 aa, Artificial Sequence
  n-mer motif
PVVHGEP

SEQ ID NO: 4875 - protein, 7 aa, Artificial Sequence
  n-mer motif
RREGILM

SEQ ID NO: 4876 - protein, 7 aa, Artificial Sequence
  n-mer motif
QQGAPTS

SEQ ID NO: 4877 - protein, 7 aa, Artificial Sequence
  n-mer motif
KVSGGET

SEQ ID NO: 4878 - protein, 7 aa, Artificial Sequence
  n-mer motif
AKHESSS

SEQ ID NO: 4879 - protein, 7 aa, Artificial Sequence
  n-mer motif
ILMGART

SEQ ID NO: 4880 - protein, 7 aa, Artificial Sequence
  n-mer motif
TLGSSST

SEQ ID NO: 4881 - protein, 7 aa, Artificial Sequence
  n-mer motif
LRSEPTQ

SEQ ID NO: 4882 - protein, 7 aa, Artificial Sequence
  n-mer motif
RSEQKTP

SEQ ID NO: 4883 - protein, 7 aa, Artificial Sequence
  n-mer motif
HAPSGAI

SEQ ID NO: 4884 - protein, 7 aa, Artificial Sequence
  n-mer motif
SSVTSRE

SEQ ID NO: 4885 - protein, 7 aa, Artificial Sequence
  n-mer motif
VNPHPAQ

SEQ ID NO: 4886 - protein, 7 aa, Artificial Sequence
  n-mer motif
QYSMDTR

SEQ ID NO: 4887 - protein, 7 aa, Artificial Sequence
  n-mer motif
TPGVTRT

SEQ ID NO: 4888 - protein, 7 aa, Artificial Sequence
  n-mer motif
LYEVGTP

SEQ ID NO: 4889 - protein, 7 aa, Artificial Sequence
  n-mer motif
TMTSELS

SEQ ID NO: 4890 - protein, 7 aa, Artificial Sequence
  n-mer motif
SGSEYRT

SEQ ID NO: 4891 - protein, 7 aa, Artificial Sequence
  n-mer motif
EMQTKNA

SEQ ID NO: 4892 - protein, 7 aa, Artificial Sequence
  n-mer motif
GHENMGV

SEQ ID NO: 4893 - protein, 7 aa, Artificial Sequence
  n-mer motif
GAHTSAS

SEQ ID NO: 4894 - protein, 7 aa, Artificial Sequence
  n-mer motif
ADTLLRR

SEQ ID NO: 4895 - protein, 7 aa, Artificial Sequence
  n-mer motif
DNSNNVP

SEQ ID NO: 4896 - protein, 7 aa, Artificial Sequence
  n-mer motif
MTANLVE

SEQ ID NO: 4897 - protein, 7 aa, Artificial Sequence
  n-mer motif
EAGRTLQ

SEQ ID NO: 4898 - protein, 7 aa, Artificial Sequence
  n-mer motif
RHVVPDS

SEQ ID NO: 4899 - protein, 7 aa, Artificial Sequence
  n-mer motif
VSSEQYR

SEQ ID NO: 4900 - protein, 7 aa, Artificial Sequence
  n-mer motif
GIEASRG

SEQ ID NO: 4901 - protein, 7 aa, Artificial Sequence
  n-mer motif
RQGVNGV

SEQ ID NO: 4902 - protein, 7 aa, Artificial Sequence
  n-mer motif
TVMMSTR

SEQ ID NO: 4903 - protein, 7 aa, Artificial Sequence
  n-mer motif
WQDHNKV

SEQ ID NO: 4904 - protein, 7 aa, Artificial Sequence
  n-mer motif
GITGSTG

SEQ ID NO: 4905 - protein, 7 aa, Artificial Sequence
  n-mer motif
NYAQRDG

SEQ ID NO: 4906 - protein, 7 aa, Artificial Sequence
  n-mer motif
KQEALSS

SEQ ID NO: 4907 - protein, 7 aa, Artificial Sequence
  n-mer motif
STLDRSE

SEQ ID NO: 4908 - protein, 7 aa, Artificial Sequence
  n-mer motif
AITNTQQ

SEQ ID NO: 4909 - protein, 7 aa, Artificial Sequence
  n-mer motif
RLATQSA

SEQ ID NO: 4910 - protein, 7 aa, Artificial Sequence
  n-mer motif
WQLTTSH

SEQ ID NO: 4911 - protein, 7 aa, Artificial Sequence
  n-mer motif
GGSGSNT

SEQ ID NO: 4912 - protein, 7 aa, Artificial Sequence
  n-mer motif
NLVAYTK

SEQ ID NO: 4913 - protein, 7 aa, Artificial Sequence
  n-mer motif
KASHDTS

SEQ ID NO: 4914 - protein, 7 aa, Artificial Sequence
  n-mer motif
AITIIGT

SEQ ID NO: 4915 - protein, 7 aa, Artificial Sequence
  n-mer motif
NASSDRF

SEQ ID NO: 4916 - protein, 7 aa, Artificial Sequence
  n-mer motif
ETQRIEL

SEQ ID NO: 4917 - protein, 7 aa, Artificial Sequence
  n-mer motif
VIEVNSR

SEQ ID NO: 4918 - protein, 7 aa, Artificial Sequence
  n-mer motif
DRDMEGV

SEQ ID NO: 4919 - protein, 7 aa, Artificial Sequence
  n-mer motif
ISEMTRY

SEQ ID NO: 4920 - protein, 7 aa, Artificial Sequence
  n-mer motif
EHDVSTR

SEQ ID NO: 4921 - protein, 7 aa, Artificial Sequence
  n-mer motif
RMEETAY

SEQ ID NO: 4922 - protein, 7 aa, Artificial Sequence
  n-mer motif
YSTDLRM

SEQ ID NO: 4923 - protein, 7 aa, Artificial Sequence
  n-mer motif
VPEPKKA

SEQ ID NO: 4924 - protein, 7 aa, Artificial Sequence
  n-mer motif
TYAPRSP

SEQ ID NO: 4925 - protein, 7 aa, Artificial Sequence
  n-mer motif
AAASPLA

SEQ ID NO: 4926 - protein, 7 aa, Artificial Sequence
  n-mer motif
SGTYASR

SEQ ID NO: 4927 - protein, 7 aa, Artificial Sequence
  n-mer motif
TEASIAA

SEQ ID NO: 4928 - protein, 7 aa, Artificial Sequence
  n-mer motif
RIVDTLG

SEQ ID NO: 4929 - protein, 7 aa, Artificial Sequence
  n-mer motif
YLQEKFP

SEQ ID NO: 4930 - protein, 7 aa, Artificial Sequence
  n-mer motif
VHDQGAG

SEQ ID NO: 4931 - protein, 7 aa, Artificial Sequence
  n-mer motif
PQATLNN

SEQ ID NO: 4932 - protein, 7 aa, Artificial Sequence
  n-mer motif
CGMSECS

SEQ ID NO: 4933 - protein, 7 aa, Artificial Sequence
  n-mer motif
GSHNGPT

SEQ ID NO: 4934 - protein, 7 aa, Artificial Sequence
  n-mer motif
FGSGPNL

SEQ ID NO: 4935 - protein, 7 aa, Artificial Sequence
  n-mer motif
MDTNTHR

SEQ ID NO: 4936 - protein, 7 aa, Artificial Sequence
  n-mer motif
KNNPEDG

SEQ ID NO: 4937 - protein, 7 aa, Artificial Sequence
  n-mer motif
LPTATGQ

SEQ ID NO: 4938 - protein, 7 aa, Artificial Sequence
  n-mer motif
TAERTEY

SEQ ID NO: 4939 - protein, 7 aa, Artificial Sequence
  n-mer motif
NYRDITM

SEQ ID NO: 4940 - protein, 7 aa, Artificial Sequence
  n-mer motif
PARSDAL

SEQ ID NO: 4941 - protein, 7 aa, Artificial Sequence
  n-mer motif
SVVTLGV

SEQ ID NO: 4942 - protein, 7 aa, Artificial Sequence
  n-mer motif
VVKEIKL

SEQ ID NO: 4943 - protein, 7 aa, Artificial Sequence
  n-mer motif
DHSKQNS

SEQ ID NO: 4944 - protein, 7 aa, Artificial Sequence
  n-mer motif
QSNLVIN

SEQ ID NO: 4945 - protein, 7 aa, Artificial Sequence
  n-mer motif
IPVGAMA

SEQ ID NO: 4946 - protein, 7 aa, Artificial Sequence
  n-mer motif
TSEMRTA

SEQ ID NO: 4947 - protein, 7 aa, Artificial Sequence
  n-mer motif
GSQRAMN

SEQ ID NO: 4948 - protein, 7 aa, Artificial Sequence
  n-mer motif
HLSQANH

SEQ ID NO: 4949 - protein, 7 aa, Artificial Sequence
  n-mer motif
GGNSHGV

SEQ ID NO: 4950 - protein, 7 aa, Artificial Sequence
  n-mer motif
VTRSTKE

SEQ ID NO: 4951 - protein, 7 aa, Artificial Sequence
  n-mer motif
MLRASTA

SEQ ID NO: 4952 - protein, 7 aa, Artificial Sequence
  n-mer motif
GRQIPEQ

SEQ ID NO: 4953 - protein, 7 aa, Artificial Sequence
  n-mer motif
WNQNVSH

SEQ ID NO: 4954 - protein, 7 aa, Artificial Sequence
  n-mer motif
QRGELPA

SEQ ID NO: 4955 - protein, 7 aa, Artificial Sequence
  n-mer motif
ANDSLRS

SEQ ID NO: 4956 - protein, 7 aa, Artificial Sequence
  n-mer motif
NMPPESH

SEQ ID NO: 4957 - protein, 7 aa, Artificial Sequence
  n-mer motif
NLSLQSL

SEQ ID NO: 4958 - protein, 7 aa, Artificial Sequence
  n-mer motif
TSDGLLS

SEQ ID NO: 4959 - protein, 7 aa, Artificial Sequence
  n-mer motif
AGQAYQS

SEQ ID NO: 4960 - protein, 7 aa, Artificial Sequence
  n-mer motif
LSVKEEI

SEQ ID NO: 4961 - protein, 7 aa, Artificial Sequence
  n-mer motif
DNSPANH

SEQ ID NO: 4962 - protein, 7 aa, Artificial Sequence
  n-mer motif
MHNLPSY

SEQ ID NO: 4963 - protein, 7 aa, Artificial Sequence
  n-mer motif
YQASNNS

SEQ ID NO: 4964 - protein, 7 aa, Artificial Sequence
  n-mer motif
ARAEGVF

SEQ ID NO: 4965 - protein, 7 aa, Artificial Sequence
  n-mer motif
GREGNLP

SEQ ID NO: 4966 - protein, 7 aa, Artificial Sequence
  n-mer motif
QAAERDR

SEQ ID NO: 4967 - protein, 7 aa, Artificial Sequence
  n-mer motif
VENNRMS

SEQ ID NO: 4968 - protein, 7 aa, Artificial Sequence
  n-mer motif
NMSHSTL

SEQ ID NO: 4969 - protein, 7 aa, Artificial Sequence
  n-mer motif
SSLGLAP

SEQ ID NO: 4970 - protein, 7 aa, Artificial Sequence
  n-mer motif
NVAPYSS

SEQ ID NO: 4971 - protein, 7 aa, Artificial Sequence
  n-mer motif
RPAQLPE

SEQ ID NO: 4972 - protein, 7 aa, Artificial Sequence
  n-mer motif
MSGSGNA

SEQ ID NO: 4973 - protein, 7 aa, Artificial Sequence
  n-mer motif
HGGEHRN

SEQ ID NO: 4974 - protein, 7 aa, Artificial Sequence
  n-mer motif
ASGARYV

SEQ ID NO: 4975 - protein, 7 aa, Artificial Sequence
  n-mer motif
QNHASGE

SEQ ID NO: 4976 - protein, 7 aa, Artificial Sequence
  n-mer motif
AHQKDLR

SEQ ID NO: 4977 - protein, 7 aa, Artificial Sequence
  n-mer motif
FGKVGTA

SEQ ID NO: 4978 - protein, 7 aa, Artificial Sequence
  n-mer motif
LQKSTLA

SEQ ID NO: 4979 - protein, 7 aa, Artificial Sequence
  n-mer motif
IHNESYG

SEQ ID NO: 4980 - DNA, 21 bp, Artificial Sequence
  n-mer motif encoding polynucleotide
aggggtgatctttctacgcct

SEQ ID NO: 4981 - DNA, 21 bp, Artificial Sequence
  n-mer motif encoding polynucleotide
agaggcgacttatccacaccc

SEQ ID NO: 4982 - DNA, 21 bp, Artificial Sequence
  n-mer motif encoding polynucleotide
agaggagacttgacaacccca

SEQ ID NO: 4983 - DNA, 21 bp, Artificial Sequence
  n-mer motif encoding polynucleotide
aggggcgacctgaaccaatac

SEQ ID NO: 4984 - DNA, 21 bp, Artificial Sequence
  n-mer motif encoding polynucleotide
cggggtgatcagctttatcat

SEQ ID NO: 4985 - DNA, 21 bp, Artificial Sequence
  n-mer motif encoding polynucleotide
aggggggatgcgacggagctt

SEQ ID NO: 4986 - DNA, 21 bp, Artificial Sequence
  n-mer motif encoding polynucleotide
cgaggagacaccatgagcaaa

SEQ ID NO: 4987 - DNA, 21 bp, Artificial Sequence
  n-mer motif encoding polynucleotide
cggggtgatcttaatcagtat

SEQ ID NO: 4988 - DNA, 21 bp, Artificial Sequence
  n-mer motif encoding polynucleotide
cggggtgatcttactacgcct

SEQ ID NO: 4989 - DNA, 21 bp, Artificial Sequence
  n-mer motif encoding polynucleotide
cgcggcgacatgataaacacc

SEQ ID NO: 4990 - DNA, 21 bp, Artificial Sequence
  n-mer motif encoding polynucleotide
cggggggatactatgtctaag

SEQ ID NO: 4991 - DNA, 21 bp, Artificial Sequence
  n-mer motif encoding polynucleotide
cgaggcgacacaatgaactac

SEQ ID NO: 4992 - DNA, 21 bp, Artificial Sequence
  n-mer motif encoding polynucleotide
cggggtgacgcaacagaattg

SEQ ID NO: 4993 - DNA, 21 bp, Artificial Sequence
  n-mer motif encoding polynucleotide
cgtttggacctgcaagtccac

SEQ ID NO: 4994 - DNA, 21 bp, Artificial Sequence
  n-mer motif encoding polynucleotide
cgtggtgatgtggcggctaag

SEQ ID NO: 4995 - DNA, 21 bp, Artificial Sequence
  n-mer motif encoding polynucleotide
aggggcgacctcaacgacagc

SEQ ID NO: 4996 - DNA, 21 bp, Artificial Sequence
  n-mer motif encoding polynucleotide
cgtggggatttgaatgattct

SEQ ID NO: 4997 - DNA, 21 bp, Artificial Sequence
  n-mer motif encoding polynucleotide
tcttatggtaatactcatgat

SEQ ID NO: 4998 - DNA, 21 bp, Artificial Sequence
  n-mer motif encoding polynucleotide
cgtttggacctgcaagtcaac

SEQ ID NO: 4999 - DNA, 21 bp, Artificial Sequence
  n-mer motif encoding polynucleotide
aaagcgggacaactagtggaa

SEQ ID NO: 5000 - DNA, 21 bp, Artificial Sequence
  n-mer motif encoding polynucleotide
gatcagacggctagtattgtt

SEQ ID NO: 5001 - DNA, 21 bp, Artificial Sequence
  n-mer motif encoding polynucleotide
tatattgctgcgggtgagcag

SEQ ID NO: 5002 - DNA, 21 bp, Artificial Sequence
  n-mer motif encoding polynucleotide
gcggttgttctgaatagtaat

SEQ ID NO: 5003 - DNA, 21 bp, Artificial Sequence
  n-mer motif encoding polynucleotide
tctaaaggaaacgaacaaatg

SEQ ID NO: 5004 - DNA, 21 bp, Artificial Sequence
  n-mer motif encoding polynucleotide
gcaaaccccaacatactagac

SEQ ID NO: 5005 - DNA, 21 bp, Artificial Sequence
  n-mer motif encoding polynucleotide
cacaacaaaccaaacggagac

SEQ ID NO: 5006 - DNA, 21 bp, Artificial Sequence
  n-mer motif encoding polynucleotide
gataagactgagatgctgcag

SEQ ID NO: 5007 - DNA, 21 bp, Artificial Sequence
  n-mer motif encoding polynucleotide
acagaacaatcttactcacga

SEQ ID NO: 5008 - DNA, 21 bp, Artificial Sequence
  n-mer motif encoding polynucleotide
actgtgatgatgagtacgagg

SEQ ID NO: 5009 - DNA, 21 bp, Artificial Sequence
  n-mer motif encoding polynucleotide
gtctctacatacctcctggca

SEQ ID NO: 5010 - DNA, 21 bp, Artificial Sequence
  n-mer motif encoding polynucleotide
cctaatgttacgcagtcttat

SEQ ID NO: 5011 - DNA, 21 bp, Artificial Sequence
  n-mer motif encoding polynucleotide
atgagtaatttggggtatgag

SEQ ID NO: 5012 - DNA, 21 bp, Artificial Sequence
  n-mer motif encoding polynucleotide
acgatgggtgctaatggtact

SEQ ID NO: 5013 - DNA, 21 bp, Artificial Sequence
  n-mer motif encoding polynucleotide
aatgttaatgcgcagagtagg

SEQ ID NO: 5014 - DNA, 21 bp, Artificial Sequence
  n-mer motif encoding polynucleotide
gaccaaaacttcgaacgtaga

SEQ ID NO: 5015 - DNA, 21 bp, Artificial Sequence
  n-mer motif encoding polynucleotide
aacacgtacacaccgggaaaa

SEQ ID NO: 5016 - DNA, 21 bp, Artificial Sequence
  n-mer motif encoding polynucleotide
cgtggggatatgattaatacg

SEQ ID NO: 5017 - DNA, 21 bp, Artificial Sequence
  n-mer motif encoding polynucleotide
gcacaattcgaatcaggccga

SEQ ID NO: 5018 - DNA, 21 bp, Artificial Sequence
  n-mer motif encoding polynucleotide
acggcgtatcaggctggtctg

SEQ ID NO: 5019 - DNA, 21 bp, Artificial Sequence
  n-mer motif encoding polynucleotide
agtgttagttctgtggtgttg

SEQ ID NO: 5020 - DNA, 21 bp, Artificial Sequence
  n-mer motif encoding polynucleotide
gggctttctaaggcgtctgat

SEQ ID NO: 5021 - DNA, 21 bp, Artificial Sequence
  n-mer motif encoding polynucleotide
tggaacggaaacgccacacaa

SEQ ID NO: 5022 - DNA, 21 bp, Artificial Sequence
  n-mer motif encoding polynucleotide
acagccggcggcgaacgcgcc

SEQ ID NO: 5023 - DNA, 21 bp, Artificial Sequence
  n-mer motif encoding polynucleotide
tacacctctcaaaccagcact

SEQ ID NO: 5024 - DNA, 21 bp, Artificial Sequence
  n-mer motif encoding polynucleotide
gcgaacatagaaaacacgtca

SEQ ID NO: 5025 - DNA, 21 bp, Artificial Sequence
  n-mer motif encoding polynucleotide
gaactctccgttccgaaacca

SEQ ID NO: 5026 - DNA, 21 bp, Artificial Sequence
  n-mer motif encoding polynucleotide
gatcctggtcggacgggtacg

SEQ ID NO: 5027 - DNA, 21 bp, Artificial Sequence
  n-mer motif encoding polynucleotide
gatcgtccgaataatatgacg

SEQ ID NO: 5028 - DNA, 21 bp, Artificial Sequence
  n-mer motif encoding polynucleotide
tatagtactgatcttaggatg

SEQ ID NO: 5029 - DNA, 21 bp, Artificial Sequence
  n-mer motif encoding polynucleotide
cagtcggttaatagtacgagt

SEQ ID NO: 5030 - DNA, 21 bp, Artificial Sequence
  n-mer motif encoding polynucleotide
gcggcacaactcgtcagtcca

SEQ ID NO: 5031 - DNA, 21 bp, Artificial Sequence
  n-mer motif encoding polynucleotide
ctcggaggaaacagcaggttc

SEQ ID NO: 5032 - DNA, 21 bp, Artificial Sequence
  n-mer motif encoding polynucleotide
gcgacgctgaataatagttat

SEQ ID NO: 5033 - DNA, 21 bp, Artificial Sequence
  n-mer motif encoding polynucleotide
cgcttggacgttggaagcccg

SEQ ID NO: 5034 - DNA, 21 bp, Artificial Sequence
  n-mer motif encoding polynucleotide
tatcggggtagggaggattgg

SEQ ID NO: 5035 - DNA, 21 bp, Artificial Sequence
  n-mer motif encoding polynucleotide
aggggagatctttctacgcct

SEQ ID NO: 5036 - DNA, 21 bp, Artificial Sequence
  n-mer motif encoding polynucleotide
agtggtctttcgcatggtcag

SEQ ID NO: 5037 - DNA, 21 bp, Artificial Sequence
  n-mer motif encoding polynucleotide
gaacacgctacagcaaaacaa

SEQ ID NO: 5038 - DNA, 21 bp, Artificial Sequence
  n-mer motif encoding polynucleotide
ggggcggaagcgggccgccaa

SEQ ID NO: 5039 - DNA, 21 bp, Artificial Sequence
  n-mer motif encoding polynucleotide
ataagcggttccactacacac

SEQ ID NO: 5040 - DNA, 21 bp, Artificial Sequence
  n-mer motif encoding polynucleotide
ggcaccgtcgttccgggctcc

SEQ ID NO: 5041 - DNA, 21 bp, Artificial Sequence
  n-mer motif encoding polynucleotide
cataataataatatgctgaat

SEQ ID NO: 5042 - DNA, 21 bp, Artificial Sequence
  n-mer motif encoding polynucleotide
cgtctgactgatactatgcat

SEQ ID NO: 5043 - DNA, 21 bp, Artificial Sequence
  n-mer motif encoding polynucleotide
aacacctaccccttcaacgcc

SEQ ID NO: 5044 - DNA, 21 bp, Artificial Sequence
  n-mer motif encoding polynucleotide
tcaaccactactggccacatg

SEQ ID NO: 5045 - DNA, 21 bp, Artificial Sequence
  n-mer motif encoding polynucleotide
gtgcataatcctactactacg

SEQ ID NO: 5046 - DNA, 21 bp, Artificial Sequence
  n-mer motif encoding polynucleotide
aatctgcaggtgaatgcgaat

SEQ ID NO: 5047 - DNA, 21 bp, Artificial Sequence
  n-mer motif encoding polynucleotide
agatacggagaatccatcgaa

SEQ ID NO: 5048 - DNA, 21 bp, Artificial Sequence
  n-mer motif encoding polynucleotide
aatactactccgcctaatcat

SEQ ID NO: 5049 - DNA, 21 bp, Artificial Sequence
  n-mer motif encoding polynucleotide
aatactttgcagaatagtcat

SEQ ID NO: 5050 - DNA, 21 bp, Artificial Sequence
  n-mer motif encoding polynucleotide
agtctgaacaacatgggatcg

SEQ ID NO: 5051 - DNA, 21 bp, Artificial Sequence
  n-mer motif encoding polynucleotide
agaaacgaaaacgtaaacgct

SEQ ID NO: 5052 - DNA, 21 bp, Artificial Sequence
  n-mer motif encoding polynucleotide
gctgtgcatgcgactagtagt

SEQ ID NO: 5053 - DNA, 21 bp, Artificial Sequence
  n-mer motif encoding polynucleotide
acccaacacctaccatccaca

SEQ ID NO: 5054 - DNA, 21 bp, Artificial Sequence
  n-mer motif encoding polynucleotide
agtgtgttgtctcaggctaat

SEQ ID NO: 5055 - DNA, 21 bp, Artificial Sequence
  n-mer motif encoding polynucleotide
agtagctcaactgaagggcaa

SEQ ID NO: 5056 - DNA, 21 bp, Artificial Sequence
  n-mer motif encoding polynucleotide
ggtcggacggatactcctaat

SEQ ID NO: 5057 - DNA, 21 bp, Artificial Sequence
  n-mer motif encoding polynucleotide
gttcaaacccacataggagtc

SEQ ID NO: 5058 - DNA, 21 bp, Artificial Sequence
  n-mer motif encoding polynucleotide
acttctgctagtgagaattgg

SEQ ID NO: 5059 - DNA, 21 bp, Artificial Sequence
  n-mer motif encoding polynucleotide
ggaaaagccaacgacggttct

SEQ ID NO: 5060 - DNA, 21 bp, Artificial Sequence
  n-mer motif encoding polynucleotide
gtggagcggaatactgatatg

SEQ ID NO: 5061 - DNA, 21 bp, Artificial Sequence
  n-mer motif encoding polynucleotide
caaaaccacgcgtctggtgaa

SEQ ID NO: 5062 - DNA, 21 bp, Artificial Sequence
  n-mer motif encoding polynucleotide
tattatgagaagcttagtgcg

SEQ ID NO: 5063 - DNA, 21 bp, Artificial Sequence
  n-mer motif encoding polynucleotide
ttcatcgctaacactaaccca

SEQ ID NO: 5064 - DNA, 21 bp, Artificial Sequence
  n-mer motif encoding polynucleotide
acctccacggcttcaaaacaa

SEQ ID NO: 5065 - DNA, 21 bp, Artificial Sequence
  n-mer motif encoding polynucleotide
aataatgataatggttttgtt

SEQ ID NO: 5066 - DNA, 21 bp, Artificial Sequence
  n-mer motif encoding polynucleotide
gctaattctattgggggtccg

SEQ ID NO: 5067 - DNA, 21 bp, Artificial Sequence
  n-mer motif encoding polynucleotide
actggccaattagtaggaacc

SEQ ID NO: 5068 - DNA, 21 bp, Artificial Sequence
  n-mer motif encoding polynucleotide
tacagtcaatcgctgtctgaa

SEQ ID NO: 5069 - DNA, 21 bp, Artificial Sequence
  n-mer motif encoding polynucleotide
gtctacaacggcaacgtagta

SEQ ID NO: 5070 - DNA, 21 bp, Artificial Sequence
  n-mer motif encoding polynucleotide
aactcggctgaatcctcgaga

SEQ ID NO: 5071 - DNA, 21 bp, Artificial Sequence
  n-mer motif encoding polynucleotide
acgcgtaatttgtctgagagt

SEQ ID NO: 5072 - DNA, 21 bp, Artificial Sequence
  n-mer motif encoding polynucleotide
tctatgtctgatgggcttcgg

SEQ ID NO: 5073 - DNA, 21 bp, Artificial Sequence
  n-mer motif encoding polynucleotide
gtaggcgaccaatcccgcccg

SEQ ID NO: 5074 - DNA, 21 bp, Artificial Sequence
  n-mer motif encoding polynucleotide
tttacggtgaatcaggatctt

SEQ ID NO: 5075 - DNA, 21 bp, Artificial Sequence
  n-mer motif encoding polynucleotide
tatcataagtatagtacggat

SEQ ID NO: 5076 - DNA, 21 bp, Artificial Sequence
  n-mer motif encoding polynucleotide
tatggtgtgcaggcgaatagt

SEQ ID NO: 5077 - DNA, 21 bp, Artificial Sequence
  n-mer motif encoding polynucleotide
ttgcagacgcctgggacgacg

SEQ ID NO: 5078 - DNA, 21 bp, Artificial Sequence
  n-mer motif encoding polynucleotide
tatcagcagacttctagtacg

SEQ ID NO: 5079 - DNA, 21 bp, Artificial Sequence
  n-mer motif encoding polynucleotide
caaacgaacaccaacgacaga

SEQ ID NO: 5080 - DNA, 21 bp, Artificial Sequence
  n-mer motif encoding polynucleotide
atggataagtctaataattct

SEQ ID NO: 5081 - DNA, 21 bp, Artificial Sequence
  n-mer motif encoding polynucleotide
catcttagtcaggctaatcat

SEQ ID NO: 5082 - DNA, 21 bp, Artificial Sequence
  n-mer motif encoding polynucleotide
gttggtgcgagtacggcttcg

SEQ ID NO: 5083 - DNA, 21 bp, Artificial Sequence
  n-mer motif encoding polynucleotide
cacaacaacaacctgcaaaac

SEQ ID NO: 5084 - DNA, 21 bp, Artificial Sequence
  n-mer motif encoding polynucleotide
agtacttatgggaatacttat

SEQ ID NO: 5085 - DNA, 21 bp, Artificial Sequence
  n-mer motif encoding polynucleotide
cgggctgatgtttcttggtct

SEQ ID NO: 5086 - DNA, 21 bp, Artificial Sequence
  n-mer motif encoding polynucleotide
cgaggagacaacagcacaccg

SEQ ID NO: 5087 - DNA, 21 bp, Artificial Sequence
  n-mer motif encoding polynucleotide
ggtcgggattatgctatgagt

SEQ ID NO: 5088 - DNA, 21 bp, Artificial Sequence
  n-mer motif encoding polynucleotide
cctaacaacgaaaaaaacccg

SEQ ID NO: 5089 - DNA, 21 bp, Artificial Sequence
  n-mer motif encoding polynucleotide
gataatgtgaattctcagcct

SEQ ID NO: 5090 - DNA, 21 bp, Artificial Sequence
  n-mer motif encoding polynucleotide
atggggactgagtatcgtatg

SEQ ID NO: 5091 - DNA, 21 bp, Artificial Sequence
  n-mer motif encoding polynucleotide
aatcagagtattaataatatt

SEQ ID NO: 5092 - DNA, 21 bp, Artificial Sequence
  n-mer motif encoding polynucleotide
gccatagactctatcaaacaa

SEQ ID NO: 5093 - DNA, 21 bp, Artificial Sequence
  n-mer motif encoding polynucleotide
gttgagtcttcttattctcgg

SEQ ID NO: 5094 - DNA, 21 bp, Artificial Sequence
  n-mer motif encoding polynucleotide
ggtcagtatagtcagacgctt

SEQ ID NO: 5095 - DNA, 21 bp, Artificial Sequence
  n-mer motif encoding polynucleotide
accatccaagaccacataaaa

SEQ ID NO: 5096 - DNA, 21 bp, Artificial Sequence
  n-mer motif encoding polynucleotide
aacagttcccaatggcccaac

SEQ ID NO: 5097 - DNA, 21 bp, Artificial Sequence
  n-mer motif encoding polynucleotide
acggataatggtcttcttgtg

SEQ ID NO: 5098 - DNA, 21 bp, Artificial Sequence
  n-mer motif encoding polynucleotide
gtaagagaaaccacacacctc

SEQ ID NO: 5099 - DNA, 21 bp, Artificial Sequence
  n-mer motif encoding polynucleotide
cgtggtgatatgactcgtgcg

SEQ ID NO: 5100 - DNA, 21 bp, Artificial Sequence
  n-mer motif encoding polynucleotide
acttatggtattactcatgat

SEQ ID NO: 5101 - DNA, 21 bp, Artificial Sequence
  n-mer motif encoding polynucleotide
acggcgctgaatacgtatcct

SEQ ID NO: 5102 - DNA, 21 bp, Artificial Sequence
  n-mer motif encoding polynucleotide
ggtggcgaaaacagaacccca

SEQ ID NO: 5103 - DNA, 21 bp, Artificial Sequence
  n-mer motif encoding polynucleotide
tatctgcaggagaagtttcct

SEQ ID NO: 5104 - DNA, 21 bp, Artificial Sequence
  n-mer motif encoding polynucleotide
cttaatcttactaatcataat

SEQ ID NO: 5105 - DNA, 21 bp, Artificial Sequence
  n-mer motif encoding polynucleotide
ggattagctagtctacacctg

SEQ ID NO: 5106 - DNA, 21 bp, Artificial Sequence
  n-mer motif encoding polynucleotide
gtagaacacgtagcccaccaa

SEQ ID NO: 5107 - DNA, 21 bp, Artificial Sequence
  n-mer motif encoding polynucleotide
agcgaacaccacgccggaata

SEQ ID NO: 5108 - DNA, 21 bp, Artificial Sequence
  n-mer motif encoding polynucleotide
gaagcgtccaactacgaacga

SEQ ID NO: 5109 - DNA, 21 bp, Artificial Sequence
  n-mer motif encoding polynucleotide
ccctccaacagtgaaagattc

SEQ ID NO: 5110 - DNA, 21 bp, Artificial Sequence
  n-mer motif encoding polynucleotide
tcccccggcaacgggttgcta

SEQ ID NO: 5111 - DNA, 21 bp, Artificial Sequence
  n-mer motif encoding polynucleotide
atactgaaatccgacgcacca

SEQ ID NO: 5112 - DNA, 21 bp, Artificial Sequence
  n-mer motif encoding polynucleotide
tttgatagtgcgaatggtcgg

SEQ ID NO: 5113 - DNA, 21 bp, Artificial Sequence
  n-mer motif encoding polynucleotide
gatggtaagactacgtctaat

SEQ ID NO: 5114 - DNA, 21 bp, Artificial Sequence
  n-mer motif encoding polynucleotide
actaattatcctgaggcgaat

SEQ ID NO: 5115 - DNA, 21 bp, Artificial Sequence
  n-mer motif encoding polynucleotide
cgaggagaccacagcacaccg

SEQ ID NO: 5116 - DNA, 21 bp, Artificial Sequence
  n-mer motif encoding polynucleotide
cagacgactattctggctgct

SEQ ID NO: 5117 - DNA, 21 bp, Artificial Sequence
  n-mer motif encoding polynucleotide
gctactgcgcatcaggatggt

SEQ ID NO: 5118 - DNA, 21 bp, Artificial Sequence
  n-mer motif encoding polynucleotide
caagccctggccaccacaaac

SEQ ID NO: 5119 - DNA, 21 bp, Artificial Sequence
  n-mer motif encoding polynucleotide
tataatgctactccttcgcag

SEQ ID NO: 5120 - DNA, 21 bp, Artificial Sequence
  n-mer motif encoding polynucleotide
gagctgtctactcctatggtt

SEQ ID NO: 5121 - DNA, 21 bp, Artificial Sequence
  n-mer motif encoding polynucleotide
attaatattagtagtgatttt

SEQ ID NO: 5122 - DNA, 21 bp, Artificial Sequence
  n-mer motif encoding polynucleotide
gtaacggcacaccaattatcc

SEQ ID NO: 5123 - DNA, 21 bp, Artificial Sequence
  n-mer motif encoding polynucleotide
ggagaaagctcctcaataagc

SEQ ID NO: 5124 - DNA, 21 bp, Artificial Sequence
  n-mer motif encoding polynucleotide
gaatccctcccaatctctaaa

SEQ ID NO: 5125 - DNA, 21 bp, Artificial Sequence
  n-mer motif encoding polynucleotide
acgaatgttagtacgcttttg

SEQ ID NO: 5126 - DNA, 21 bp, Artificial Sequence
  n-mer motif encoding polynucleotide
tggcagacgaatggtatgcag

SEQ ID NO: 5127 - DNA, 21 bp, Artificial Sequence
  n-mer motif encoding polynucleotide
tacaggatggaaacgaaccca

SEQ ID NO: 5128 - DNA, 21 bp, Artificial Sequence
  n-mer motif encoding polynucleotide
ataaccggcaacaccgtcgga

SEQ ID NO: 5129 - DNA, 21 bp, Artificial Sequence
  n-mer motif encoding polynucleotide
ctgaacactctaatccacaaa

SEQ ID NO: 5130 - DNA, 21 bp, Artificial Sequence
  n-mer motif encoding polynucleotide
gggacttccttggaaaaccga

SEQ ID NO: 5131 - DNA, 21 bp, Artificial Sequence
  n-mer motif encoding polynucleotide
taccaacacaaccaagcccac

SEQ ID NO: 5132 - DNA, 21 bp, Artificial Sequence
  n-mer motif encoding polynucleotide
attgagagtaagactgtgcag

SEQ ID NO: 5133 - DNA, 21 bp, Artificial Sequence
  n-mer motif encoding polynucleotide
tatacgcagggtattatgaat

SEQ ID NO: 5134 - DNA, 21 bp, Artificial Sequence
  n-mer motif encoding polynucleotide
agtacgaatgaggctcctaag

SEQ ID NO: 5135 - DNA, 21 bp, Artificial Sequence
  n-mer motif encoding polynucleotide
ttgtctcagaattttaatcct

SEQ ID NO: 5136 - DNA, 21 bp, Artificial Sequence
  n-mer motif encoding polynucleotide
tactcttctgaaatgagcgaa

SEQ ID NO: 5137 - DNA, 21 bp, Artificial Sequence
  n-mer motif encoding polynucleotide
tcatacggaggatctggcccc

SEQ ID NO: 5138 - DNA, 21 bp, Artificial Sequence
  n-mer motif encoding polynucleotide
atggacgctgcgtacggtagt

SEQ ID NO: 5139 - DNA, 21 bp, Artificial Sequence
  n-mer motif encoding polynucleotide
ccttttaatcctgggaatgtg

SEQ ID NO: 5140 - DNA, 21 bp, Artificial Sequence
  n-mer motif encoding polynucleotide
caaaaatcggaaacctacact

SEQ ID NO: 5141 - DNA, 21 bp, Artificial Sequence
  n-mer motif encoding polynucleotide
aacaaagaccacaaccacctg

SEQ ID NO: 5142 - DNA, 21 bp, Artificial Sequence
  n-mer motif encoding polynucleotide
ctaaccggctctgacatgaaa

SEQ ID NO: 5143 - DNA, 21 bp, Artificial Sequence
  n-mer motif encoding polynucleotide
tctaaggatagtactatgtat

SEQ ID NO: 5144 - DNA, 21 bp, Artificial Sequence
  n-mer motif encoding polynucleotide
gaagcattcccgcgagcgggc

SEQ ID NO: 5145 - DNA, 21 bp, Artificial Sequence
  n-mer motif encoding polynucleotide
gaacacactcacttaaacccg

SEQ ID NO: 5146 - DNA, 21 bp, Artificial Sequence
  n-mer motif encoding polynucleotide
agttcggacccaaaaggtcaa

SEQ ID NO: 5147 - DNA, 21 bp, Artificial Sequence
  n-mer motif encoding polynucleotide
aaaaccatcgacatagcacaa

SEQ ID NO: 5148 - DNA, 21 bp, Artificial Sequence
  n-mer motif encoding polynucleotide
accggtagcttgaactctatg

SEQ ID NO: 5149 - DNA, 21 bp, Artificial Sequence
  n-mer motif encoding polynucleotide
atgcaacgcgaagacgcgaac

SEQ ID NO: 5150 - DNA, 21 bp, Artificial Sequence
  n-mer motif encoding polynucleotide
gcctctacagtctcactctac

SEQ ID NO: 5151 - DNA, 21 bp, Artificial Sequence
  n-mer motif encoding polynucleotide
ggccgtgacgacctcacaaac

SEQ ID NO: 5152 - DNA, 21 bp, Artificial Sequence
  n-mer motif encoding polynucleotide
tctaatccgggtaatcataat

SEQ ID NO: 5153 - DNA, 21 bp, Artificial Sequence
  n-mer motif encoding polynucleotide
gatacttataagggtaagtgg

SEQ ID NO: 5154 - DNA, 21 bp, Artificial Sequence
  n-mer motif encoding polynucleotide
ccacccaacggcagcagtaga

SEQ ID NO: 5155 - DNA, 21 bp, Artificial Sequence
  n-mer motif encoding polynucleotide
gcttcttatagtatttctgat

SEQ ID NO: 5156 - DNA, 21 bp, Artificial Sequence
  n-mer motif encoding polynucleotide
gtgactgttagtctggatggg

SEQ ID NO: 5157 - DNA, 21 bp, Artificial Sequence
  n-mer motif encoding polynucleotide
atggccataggccactcccca

SEQ ID NO: 5158 - DNA, 21 bp, Artificial Sequence
  n-mer motif encoding polynucleotide
tttcggacggtgtatactggt

SEQ ID NO: 5159 - DNA, 21 bp, Artificial Sequence
  n-mer motif encoding polynucleotide
aaaaaacggcagcccatcgcc

SEQ ID NO: 5160 - DNA, 21 bp, Artificial Sequence
  n-mer motif encoding polynucleotide
aaaaataagctctactatggc

SEQ ID NO: 5161 - DNA, 21 bp, Artificial Sequence
  n-mer motif encoding polynucleotide
tctacatctccggttaacagc

SEQ ID NO: 5162 - DNA, 21 bp, Artificial Sequence
  n-mer motif encoding polynucleotide
gggtctgggattgcggggact

SEQ ID NO: 5163 - DNA, 21 bp, Artificial Sequence
  n-mer motif encoding polynucleotide
atcgacgtactgaacggaagt

SEQ ID NO: 5164 - DNA, 21 bp, Artificial Sequence
  n-mer motif encoding polynucleotide
ggtcataatatggcacaggcg

SEQ ID NO: 5165 - DNA, 21 bp, Artificial Sequence
  n-mer motif encoding polynucleotide
acgaggagcaactccgacgaa

SEQ ID NO: 5166 - DNA, 21 bp, Artificial Sequence
  n-mer motif encoding polynucleotide
ggagcaaaaggaaccatgggc

SEQ ID NO: 5167 - DNA, 21 bp, Artificial Sequence
  n-mer motif encoding polynucleotide
gctactactcttactggtgat

SEQ ID NO: 5168 - DNA, 21 bp, Artificial Sequence
  n-mer motif encoding polynucleotide
ttcaacacatcgtcggaattc

SEQ ID NO: 5169 - DNA, 21 bp, Artificial Sequence
  n-mer motif encoding polynucleotide
tatacggcgcagaccggctgg

SEQ ID NO: 5170 - DNA, 21 bp, Artificial Sequence
  n-mer motif encoding polynucleotide
cgagtaaacaacgacgcaata

SEQ ID NO: 5171 - DNA, 21 bp, Artificial Sequence
  n-mer motif encoding polynucleotide
actattcagcttactgatact

SEQ ID NO: 5172 - DNA, 21 bp, Artificial Sequence
  n-mer motif encoding polynucleotide
gccagcatgccctctgtagac

SEQ ID NO: 5173 - DNA, 21 bp, Artificial Sequence
  n-mer motif encoding polynucleotide
aatcaggtgggtgcgtctgcg

SEQ ID NO: 5174 - DNA, 21 bp, Artificial Sequence
  n-mer motif encoding polynucleotide
ggaaacatggtgactccaaac

SEQ ID NO: 5175 - DNA, 21 bp, Artificial Sequence
  n-mer motif encoding polynucleotide
cgtggtgaccaaggcacacac

SEQ ID NO: 5176 - DNA, 21 bp, Artificial Sequence
  n-mer motif encoding polynucleotide
tcgagtgattctcgtattccg

SEQ ID NO: 5177 - DNA, 21 bp, Artificial Sequence
  n-mer motif encoding polynucleotide
ggactgcacggcaccaacgca

SEQ ID NO: 5178 - DNA, 21 bp, Artificial Sequence
  n-mer motif encoding polynucleotide
tctagttatcagtctgggctg

SEQ ID NO: 5179 - DNA, 21 bp, Artificial Sequence
  n-mer motif encoding polynucleotide
acagcctactcgcccacagtc

SEQ ID NO: 5180 - DNA, 21 bp, Artificial Sequence
  n-mer motif encoding polynucleotide
cgcagtgacaccactaacgcc

SEQ ID NO: 5181 - DNA, 21 bp, Artificial Sequence
  n-mer motif encoding polynucleotide
cgtattgtggctaatgagcag

SEQ ID NO: 5182 - DNA, 21 bp, Artificial Sequence
  n-mer motif encoding polynucleotide
atccacaacgaatcatacgtc

SEQ ID NO: 5183 - DNA, 21 bp, Artificial Sequence
  n-mer motif encoding polynucleotide
cagcagaatacgcgtttgccg

SEQ ID NO: 5184 - DNA, 21 bp, Artificial Sequence
  n-mer motif encoding polynucleotide
ggtatcaactcctcacacttc

SEQ ID NO: 5185 - DNA, 21 bp, Artificial Sequence
  n-mer motif encoding polynucleotide
ggtatgacttctaatcaggtt

SEQ ID NO: 5186 - DNA, 21 bp, Artificial Sequence
  n-mer motif encoding polynucleotide
agggagattgttcatagtaat

SEQ ID NO: 5187 - DNA, 21 bp, Artificial Sequence
  n-mer motif encoding polynucleotide
gcagaacacacgtacacggtc

SEQ ID NO: 5188 - DNA, 21 bp, Artificial Sequence
  n-mer motif encoding polynucleotide
cctgctacgctacacctgaca

SEQ ID NO: 5189 - DNA, 21 bp, Artificial Sequence
  n-mer motif encoding polynucleotide
aagcagactgatagtaggggt

SEQ ID NO: 5190 - DNA, 21 bp, Artificial Sequence
  n-mer motif encoding polynucleotide
actatggtagaagtactgcca

SEQ ID NO: 5191 - DNA, 21 bp, Artificial Sequence
  n-mer motif encoding polynucleotide
atcccaaccggccaaactagc

SEQ ID NO: 5192 - DNA, 21 bp, Artificial Sequence
  n-mer motif encoding polynucleotide
atgataaaaaccaacatgttg

SEQ ID NO: 5193 - DNA, 21 bp, Artificial Sequence
  n-mer motif encoding polynucleotide
gcggaacgacccactagagac

SEQ ID NO: 5194 - DNA, 21 bp, Artificial Sequence
  n-mer motif encoding polynucleotide
cgggatctggggcagaccggc

SEQ ID NO: 5195 - DNA, 21 bp, Artificial Sequence
  n-mer motif encoding polynucleotide
aatgaggggcgtgtgcagact

SEQ ID NO: 5196 - DNA, 21 bp, Artificial Sequence
  n-mer motif encoding polynucleotide
actgcggctagtactgcgagg

SEQ ID NO: 5197 - DNA, 21 bp, Artificial Sequence
  n-mer motif encoding polynucleotide
acccaagggaacaacatggta

SEQ ID NO: 5198 - DNA, 21 bp, Artificial Sequence
  n-mer motif encoding polynucleotide
catagtacttttcctacgact

SEQ ID NO: 5199 - DNA, 21 bp, Artificial Sequence
  n-mer motif encoding polynucleotide
caatctatcggccaccccgtt

SEQ ID NO: 5200 - DNA, 21 bp, Artificial Sequence
  n-mer motif encoding polynucleotide
tcgggtgttaatagtgagcgt

SEQ ID NO: 5201 - DNA, 21 bp, Artificial Sequence
  n-mer motif encoding polynucleotide
cctcacgccaacggagtgaca

SEQ ID NO: 5202 - DNA, 21 bp, Artificial Sequence
  n-mer motif encoding polynucleotide
gaccaccaacaagccctagct

SEQ ID NO: 5203 - DNA, 21 bp, Artificial Sequence
  n-mer motif encoding polynucleotide
agtcagcagggttttactctg

SEQ ID NO: 5204 - DNA, 21 bp, Artificial Sequence
  n-mer motif encoding polynucleotide
acaaacgctgctctagtacca

SEQ ID NO: 5205 - DNA, 21 bp, Artificial Sequence
  n-mer motif encoding polynucleotide
ggtgttagtagtaattctgcg

SEQ ID NO: 5206 - DNA, 21 bp, Artificial Sequence
  n-mer motif encoding polynucleotide
catgatacggttggggagagg

SEQ ID NO: 5207 - DNA, 21 bp, Artificial Sequence
  n-mer motif encoding polynucleotide
gcgttaaacgcccaagggatc

SEQ ID NO: 5208 - DNA, 21 bp, Artificial Sequence
  n-mer motif encoding polynucleotide
catgatagtatgtgttgtgcg

SEQ ID NO: 5209 - DNA, 21 bp, Artificial Sequence
  n-mer motif encoding polynucleotide
tacatcgcggcaggggaacaa

SEQ ID NO: 5210 - DNA, 21 bp, Artificial Sequence
  n-mer motif encoding polynucleotide
gagaatgctcgtgagggtgtg

SEQ ID NO: 5211 - DNA, 21 bp, Artificial Sequence
  n-mer motif encoding polynucleotide
gctacggtttataatgagttg

SEQ ID NO: 5212 - DNA, 21 bp, Artificial Sequence
  n-mer motif encoding polynucleotide
gacactaacggaataaaatca

SEQ ID NO: 5213 - DNA, 21 bp, Artificial Sequence
  n-mer motif encoding polynucleotide
aagccgactgcgaatgattgg

SEQ ID NO: 5214 - DNA, 21 bp, Artificial Sequence
  n-mer motif encoding polynucleotide
tatgagagtactcatgttaat

SEQ ID NO: 5215 - DNA, 21 bp, Artificial Sequence
  n-mer motif encoding polynucleotide
tacaccaacgggggccaccta

SEQ ID NO: 5216 - DNA, 21 bp, Artificial Sequence
  n-mer motif encoding polynucleotide
gtagacaaatctagcccagtg

SEQ ID NO: 5217 - DNA, 21 bp, Artificial Sequence
  n-mer motif encoding polynucleotide
ccaatccaaaacgaatcgtcc

SEQ ID NO: 5218 - DNA, 21 bp, Artificial Sequence
  n-mer motif encoding polynucleotide
atacacaaatctagcgtcgaa

SEQ ID NO: 5219 - DNA, 21 bp, Artificial Sequence
  n-mer motif encoding polynucleotide
catgatattagtctggatcgt

SEQ ID NO: 5220 - DNA, 21 bp, Artificial Sequence
  n-mer motif encoding polynucleotide
tggtgaggggctgagtttgcc

SEQ ID NO: 5221 - DNA, 21 bp, Artificial Sequence
  n-mer motif encoding polynucleotide
tactctcaatccataaaaaac

SEQ ID NO: 5222 - DNA, 21 bp, Artificial Sequence
  n-mer motif encoding polynucleotide
gcccaagacaacaaccacgac

SEQ ID NO: 5223 - DNA, 21 bp, Artificial Sequence
  n-mer motif encoding polynucleotide
gggcagaaggagactactgcg

SEQ ID NO: 5224 - DNA, 21 bp, Artificial Sequence
  n-mer motif encoding polynucleotide
aaaagcgaagtacccgcccga

SEQ ID NO: 5225 - DNA, 21 bp, Artificial Sequence
  n-mer motif encoding polynucleotide
gaacttaacaccgcacacgca

SEQ ID NO: 5226 - DNA, 21 bp, Artificial Sequence
  n-mer motif encoding polynucleotide
agcacaaacgcgggacaaagg

SEQ ID NO: 5227 - DNA, 21 bp, Artificial Sequence
  n-mer motif encoding polynucleotide
aaggcggtttcggagattatt

SEQ ID NO: 5228 - DNA, 21 bp, Artificial Sequence
  n-mer motif encoding polynucleotide
accttcacggtcgacggtaga

SEQ ID NO: 5229 - DNA, 21 bp, Artificial Sequence
  n-mer motif encoding polynucleotide
agtacgagtggttataatact

SEQ ID NO: 5230 - DNA, 21 bp, Artificial Sequence
  n-mer motif encoding polynucleotide
aatcatagtctgtcggagcat

SEQ ID NO: 5231 - DNA, 21 bp, Artificial Sequence
  n-mer motif encoding polynucleotide
tctatgcaggatccttctttg

SEQ ID NO: 5232 - DNA, 21 bp, Artificial Sequence
  n-mer motif encoding polynucleotide
gaacaacaaaaaacagacaac

SEQ ID NO: 5233 - DNA, 21 bp, Artificial Sequence
  n-mer motif encoding polynucleotide
gctgttgtgaatgagaatatg

SEQ ID NO: 5234 - DNA, 21 bp, Artificial Sequence
  n-mer motif encoding polynucleotide
ggtcccggagaaaactaccga

SEQ ID NO: 5235 - DNA, 21 bp, Artificial Sequence
  n-mer motif encoding polynucleotide
tacaacgcaggcggagaacaa

SEQ ID NO: 5236 - DNA, 21 bp, Artificial Sequence
  n-mer motif encoding polynucleotide
gtcctctcctccaacctgtac

SEQ ID NO: 5237 - DNA, 21 bp, Artificial Sequence
  n-mer motif encoding polynucleotide
ggtctttatcagaatcctacg

SEQ ID NO: 5238 - DNA, 21 bp, Artificial Sequence
  n-mer motif encoding polynucleotide
agttcggggagtttgattact

SEQ ID NO: 5239 - DNA, 21 bp, Artificial Sequence
  n-mer motif encoding polynucleotide
tataatacggatcggactaat

SEQ ID NO: 5240 - DNA, 21 bp, Artificial Sequence
  n-mer motif encoding polynucleotide
gagaagcctcagcataatagt

SEQ ID NO: 5241 - DNA, 21 bp, Artificial Sequence
  n-mer motif encoding polynucleotide
gcggcttatgagcatgcgcct

SEQ ID NO: 5242 - DNA, 21 bp, Artificial Sequence
  n-mer motif encoding polynucleotide
ggcggcaactacaacacaact

SEQ ID NO: 5243 - DNA, 21 bp, Artificial Sequence
  n-mer motif encoding polynucleotide
tatctgaatagtacgcagatt

SEQ ID NO: 5244 - DNA, 21 bp, Artificial Sequence
  n-mer motif encoding polynucleotide
tctaattctaatactgctgct

SEQ ID NO: 5245 - DNA, 21 bp, Artificial Sequence
  n-mer motif encoding polynucleotide
tcggataataggaatactgcg

SEQ ID NO: 5246 - DNA, 21 bp, Artificial Sequence
  n-mer motif encoding polynucleotide
cgctcgttggacagcgggatg

SEQ ID NO: 5247 - DNA, 21 bp, Artificial Sequence
  n-mer motif encoding polynucleotide
gttatggatacgcatgggatg

SEQ ID NO: 5248 - DNA, 21 bp, Artificial Sequence
  n-mer motif encoding polynucleotide
catgttacggcggtggttgat

SEQ ID NO: 5249 - DNA, 21 bp, Artificial Sequence
  n-mer motif encoding polynucleotide
agtatcacccacagcaacacc

SEQ ID NO: 5250 - DNA, 21 bp, Artificial Sequence
  n-mer motif encoding polynucleotide
ggatacggcagttacagcaac

SEQ ID NO: 5251 - DNA, 21 bp, Artificial Sequence
  n-mer motif encoding polynucleotide
cgttggtctgaaaacaactcc

SEQ ID NO: 5252 - DNA, 21 bp, Artificial Sequence
  n-mer motif encoding polynucleotide
atgtctagccacaccgtccaa

SEQ ID NO: 5253 - DNA, 21 bp, Artificial Sequence
  n-mer motif encoding polynucleotide
tatgttagggcgcaggatcag

SEQ ID NO: 5254 - DNA, 21 bp, Artificial Sequence
  n-mer motif encoding polynucleotide
tttgagggtgataagacttat

SEQ ID NO: 5255 - DNA, 21 bp, Artificial Sequence
  n-mer motif encoding polynucleotide
gttagctccggccacacgaaa

SEQ ID NO: 5256 - DNA, 21 bp, Artificial Sequence
  n-mer motif encoding polynucleotide
tcgatgaacctgccaacttca

SEQ ID NO: 5257 - DNA, 21 bp, Artificial Sequence
  n-mer motif encoding polynucleotide
ctgaatcctcagcatgagttg

SEQ ID NO: 5258 - DNA, 21 bp, Artificial Sequence
  n-mer motif encoding polynucleotide
cttccgcctgcgtcggcgggt

SEQ ID NO: 5259 - DNA, 21 bp, Artificial Sequence
  n-mer motif encoding polynucleotide
ggagggaactcccacggggta

SEQ ID NO: 5260 - DNA, 21 bp, Artificial Sequence
  n-mer motif encoding polynucleotide
gggggtacggggttgtcgaag

SEQ ID NO: 5261 - DNA, 21 bp, Artificial Sequence
  n-mer motif encoding polynucleotide
agtttgaattcttcgagtact

SEQ ID NO: 5262 - DNA, 21 bp, Artificial Sequence
  n-mer motif encoding polynucleotide
atgcctagtgaaccaccaggg

SEQ ID NO: 5263 - DNA, 21 bp, Artificial Sequence
  n-mer motif encoding polynucleotide
gttgtgcattcgagtattact

SEQ ID NO: 5264 - DNA, 21 bp, Artificial Sequence
  n-mer motif encoding polynucleotide
ttgagtctggctgggaatagg

SEQ ID NO: 5265 - DNA, 21 bp, Artificial Sequence
  n-mer motif encoding polynucleotide
gcggacatgcaacacaccgta

SEQ ID NO: 5266 - DNA, 21 bp, Artificial Sequence
  n-mer motif encoding polynucleotide
tttcgtgatggtcagggtatg

SEQ ID NO: 5267 - DNA, 21 bp, Artificial Sequence
  n-mer motif encoding polynucleotide
accggaacagcgatctcccga

SEQ ID NO: 5268 - DNA, 21 bp, Artificial Sequence
  n-mer motif encoding polynucleotide
atggggaagcatgagggtctt

SEQ ID NO: 5269 - DNA, 21 bp, Artificial Sequence
  n-mer motif encoding polynucleotide
ccggaatccgccgccaaaagc

SEQ ID NO: 5270 - DNA, 21 bp, Artificial Sequence
  n-mer motif encoding polynucleotide
acccaagccttctccctaggc

SEQ ID NO: 5271 - DNA, 21 bp, Artificial Sequence
  n-mer motif encoding polynucleotide
actgatggtatttttcagcct

SEQ ID NO: 5272 - DNA, 21 bp, Artificial Sequence
  n-mer motif encoding polynucleotide
gggagcccagtgatagtaaac

SEQ ID NO: 5273 - DNA, 21 bp, Artificial Sequence
  n-mer motif encoding polynucleotide
gggcgtgataatcatcatgcg

SEQ ID NO: 5274 - DNA, 21 bp, Artificial Sequence
  n-mer motif encoding polynucleotide
ccgcgttctattacggagttg

SEQ ID NO: 5275 - DNA, 21 bp, Artificial Sequence
  n-mer motif encoding polynucleotide
tgggtaaacagtgtgggcaac

SEQ ID NO: 5276 - DNA, 21 bp, Artificial Sequence
  n-mer motif encoding polynucleotide
gttcatgggacgttgacttat

SEQ ID NO: 5277 - DNA, 21 bp, Artificial Sequence
  n-mer motif encoding polynucleotide
ggtgtgtatattgatggtcgg

SEQ ID NO: 5278 - DNA, 21 bp, Artificial Sequence
  n-mer motif encoding polynucleotide
atgagtaatgatttgcctggg

SEQ ID NO: 5279 - DNA, 21 bp, Artificial Sequence
  n-mer motif encoding polynucleotide
aatcggtcggatagttttgcg

SEQ ID NO: 5280 - DNA, 21 bp, Artificial Sequence
  n-mer motif encoding polynucleotide
gggcaaacaaacgcagtacac

SEQ ID NO: 5281 - DNA, 21 bp, Artificial Sequence
  n-mer motif encoding polynucleotide
tacgtcgacaaatcaatgaca

SEQ ID NO: 5282 - DNA, 21 bp, Artificial Sequence
  n-mer motif encoding polynucleotide
agtgtgatggtgggtacgaat

SEQ ID NO: 5283 - DNA, 21 bp, Artificial Sequence
  n-mer motif encoding polynucleotide
attggtctgcagaattctact

SEQ ID NO: 5284 - DNA, 21 bp, Artificial Sequence
  n-mer motif encoding polynucleotide
aacgaccgaccgcttgccagc

SEQ ID NO: 5285 - DNA, 21 bp, Artificial Sequence
  n-mer motif encoding polynucleotide
ctcatgggcagtccaggcgcg

SEQ ID NO: 5286 - DNA, 21 bp, Artificial Sequence
  n-mer motif encoding polynucleotide
attgatcgtagtgctagtttg

SEQ ID NO: 5287 - DNA, 21 bp, Artificial Sequence
  n-mer motif encoding polynucleotide
attcaggcgaagaattctgag

SEQ ID NO: 5288 - DNA, 21 bp, Artificial Sequence
  n-mer motif encoding polynucleotide
catcagtcttttgatgctggt

SEQ ID NO: 5289 - DNA, 21 bp, Artificial Sequence
  n-mer motif encoding polynucleotide
gcggttaatgagactaggctt

SEQ ID NO: 5290 - DNA, 21 bp, Artificial Sequence
  n-mer motif encoding polynucleotide
atcgcgtcaacgtggaacatg

SEQ ID NO: 5291 - DNA, 21 bp, Artificial Sequence
  n-mer motif encoding polynucleotide
aaagtggacatgacctccaaa

SEQ ID NO: 5292 - DNA, 21 bp, Artificial Sequence
  n-mer motif encoding polynucleotide
tctcatagtattacgggtctt

SEQ ID NO: 5293 - DNA, 21 bp, Artificial Sequence
  n-mer motif encoding polynucleotide
actattactagtccgtcggtg

SEQ ID NO: 5294 - DNA, 21 bp, Artificial Sequence
  n-mer motif encoding polynucleotide
gaacacatctctagctacgga

SEQ ID NO: 5295 - DNA, 21 bp, Artificial Sequence
  n-mer motif encoding polynucleotide
ttctcaacaaactctgtaatc

SEQ ID NO: 5296 - DNA, 21 bp, Artificial Sequence
  n-mer motif encoding polynucleotide
tcgatggagggtcagcagcat

SEQ ID NO: 5297 - DNA, 21 bp, Artificial Sequence
  n-mer motif encoding polynucleotide
gtcgacaaaagcgaagccgtc

SEQ ID NO: 5298 - DNA, 21 bp, Artificial Sequence
  n-mer motif encoding polynucleotide
caagctaacttatcaataatc

SEQ ID NO: 5299 - DNA, 21 bp, Artificial Sequence
  n-mer motif encoding polynucleotide
gttaaggcgagtgctggggtt

SEQ ID NO: 5300 - DNA, 21 bp, Artificial Sequence
  n-mer motif encoding polynucleotide
tttggtacttcttatacgact

SEQ ID NO: 5301 - DNA, 21 bp, Artificial Sequence
  n-mer motif encoding polynucleotide
gggctcacaggatacccaatg

SEQ ID NO: 5302 - DNA, 21 bp, Artificial Sequence
  n-mer motif encoding polynucleotide
gctatgggagcactcgtgcac

SEQ ID NO: 5303 - DNA, 21 bp, Artificial Sequence
  n-mer motif encoding polynucleotide
gtatacgccaccgcactcgca

SEQ ID NO: 5304 - DNA, 21 bp, Artificial Sequence
  n-mer motif encoding polynucleotide
acattaacagacgttcaccga

SEQ ID NO: 5305 - DNA, 21 bp, Artificial Sequence
  n-mer motif encoding polynucleotide
ccatcctcagcgggtagcaca

SEQ ID NO: 5306 - DNA, 21 bp, Artificial Sequence
  n-mer motif encoding polynucleotide
aaaaaacgaaaacactaacta

SEQ ID NO: 5307 - DNA, 21 bp, Artificial Sequence
  n-mer motif encoding polynucleotide
gcttatcagctgactccggct

SEQ ID NO: 5308 - DNA, 21 bp, Artificial Sequence
  n-mer motif encoding polynucleotide
cttgcgcctgataatattggg

SEQ ID NO: 5309 - DNA, 21 bp, Artificial Sequence
  n-mer motif encoding polynucleotide
acaatcgtttccgcttacgcc

SEQ ID NO: 5310 - DNA, 21 bp, Artificial Sequence
  n-mer motif encoding polynucleotide
ggtaataatttgagtttgtct

SEQ ID NO: 5311 - DNA, 21 bp, Artificial Sequence
  n-mer motif encoding polynucleotide
agcacaaacaccgaacctagg

SEQ ID NO: 5312 - DNA, 21 bp, Artificial Sequence
  n-mer motif encoding polynucleotide
tcttttcagacggatcgtgcg

SEQ ID NO: 5313 - DNA, 21 bp, Artificial Sequence
  n-mer motif encoding polynucleotide
ttcttagaaggagtcgctcaa

SEQ ID NO: 5314 - DNA, 21 bp, Artificial Sequence
  n-mer motif encoding polynucleotide
caagacgtaggacgcacgaac

SEQ ID NO: 5315 - DNA, 21 bp, Artificial Sequence
  n-mer motif encoding polynucleotide
acgcatggtgatcatattcag

SEQ ID NO: 5316 - DNA, 21 bp, Artificial Sequence
  n-mer motif encoding polynucleotide
gtatcagaaggacaacgaatc

SEQ ID NO: 5317 - DNA, 21 bp, Artificial Sequence
  n-mer motif encoding polynucleotide
aacatgggtccaatgggccgg

SEQ ID NO: 5318 - DNA, 21 bp, Artificial Sequence
  n-mer motif encoding polynucleotide
ctaccctcaacagaaactttg

SEQ ID NO: 5319 - DNA, 21 bp, Artificial Sequence
  n-mer motif encoding polynucleotide
ggtggtatgtcggcgcattcg

SEQ ID NO: 5320 - DNA, 21 bp, Artificial Sequence
  n-mer motif encoding polynucleotide
gggatgatcgggcacaacgca

SEQ ID NO: 5321 - DNA, 21 bp, Artificial Sequence
  n-mer motif encoding polynucleotide
atagacgaacgttcctcgata

SEQ ID NO: 5322 - DNA, 21 bp, Artificial Sequence
  n-mer motif encoding polynucleotide
catgtgaatcctacgccggcg

SEQ ID NO: 5323 - DNA, 21 bp, Artificial Sequence
  n-mer motif encoding polynucleotide
tggtcgagaactggaaacacc

SEQ ID NO: 5324 - DNA, 21 bp, Artificial Sequence
  n-mer motif encoding polynucleotide
atcaaagactcgtaccttact

SEQ ID NO: 5325 - DNA, 21 bp, Artificial Sequence
  n-mer motif encoding polynucleotide
ttgaaccaaaacagtgtctcc

SEQ ID NO: 5326 - DNA, 21 bp, Artificial Sequence
  n-mer motif encoding polynucleotide
tctggtccgattcctgctgtt

SEQ ID NO: 5327 - DNA, 21 bp, Artificial Sequence
  n-mer motif encoding polynucleotide
atgcaagggcttaacaacatg

SEQ ID NO: 5328 - DNA, 21 bp, Artificial Sequence
  n-mer motif encoding polynucleotide
tcaaacagcggaggcaaccac

SEQ ID NO: 5329 - DNA, 21 bp, Artificial Sequence
  n-mer motif encoding polynucleotide
acgagtacgatgactgcgcgt

SEQ ID NO: 5330 - DNA, 21 bp, Artificial Sequence
  n-mer motif encoding polynucleotide
gagaatagtgatttgtcttat

SEQ ID NO: 5331 - DNA, 21 bp, Artificial Sequence
  n-mer motif encoding polynucleotide
catcctgggaatagttctgtg

SEQ ID NO: 5332 - DNA, 21 bp, Artificial Sequence
  n-mer motif encoding polynucleotide
ttaacaccccaagggactagt

SEQ ID NO: 5333 - DNA, 21 bp, Artificial Sequence
  n-mer motif encoding polynucleotide
accgacacccgaaaaaacgac

SEQ ID NO: 5334 - DNA, 21 bp, Artificial Sequence
  n-mer motif encoding polynucleotide
ggggagacgctgaggtctcag

SEQ ID NO: 5335 - DNA, 21 bp, Artificial Sequence
  n-mer motif encoding polynucleotide
agcggtgtatcagaaggaaac

SEQ ID NO: 5336 - DNA, 21 bp, Artificial Sequence
  n-mer motif encoding polynucleotide
actcagtatggtactctgccg

SEQ ID NO: 5337 - DNA, 21 bp, Artificial Sequence
  n-mer motif encoding polynucleotide
gggacggttaactcaagtgca

SEQ ID NO: 5338 - DNA, 21 bp, Artificial Sequence
  n-mer motif encoding polynucleotide
ggtaaagcaaccttagtcctc

SEQ ID NO: 5339 - DNA, 21 bp, Artificial Sequence
  n-mer motif encoding polynucleotide
ggtatatacccggcatccacc

SEQ ID NO: 5340 - DNA, 21 bp, Artificial Sequence
  n-mer motif encoding polynucleotide
ggtgttatgtctaatgctact

SEQ ID NO: 5341 - DNA, 21 bp, Artificial Sequence
  n-mer motif encoding polynucleotide
actcatgtgattggggctgtg

SEQ ID NO: 5342 - DNA, 21 bp, Artificial Sequence
  n-mer motif encoding polynucleotide
actcggagtgatattggtgtg

SEQ ID NO: 5343 - DNA, 21 bp, Artificial Sequence
  n-mer motif encoding polynucleotide
acgcttacattatctaccctc

SEQ ID NO: 5344 - DNA, 21 bp, Artificial Sequence
  n-mer motif encoding polynucleotide
tataatgagtcttcgaatgcg

SEQ ID NO: 5345 - DNA, 21 bp, Artificial Sequence
  n-mer motif encoding polynucleotide
tcgacgcaggcgcagaccggc

SEQ ID NO: 5346 - DNA, 21 bp, Artificial Sequence
  n-mer motif encoding polynucleotide
cgcgacatgatcaactcatca

SEQ ID NO: 5347 - DNA, 21 bp, Artificial Sequence
  n-mer motif encoding polynucleotide
actaagggtaataatctggtt

SEQ ID NO: 5348 - DNA, 21 bp, Artificial Sequence
  n-mer motif encoding polynucleotide
ggttctacggtgtcggcgcag

SEQ ID NO: 5349 - DNA, 21 bp, Artificial Sequence
  n-mer motif encoding polynucleotide
aggggtgatactatgaattat

SEQ ID NO: 5350 - DNA, 21 bp, Artificial Sequence
  n-mer motif encoding polynucleotide
catgcggatgtgaatgctggg

SEQ ID NO: 5351 - DNA, 21 bp, Artificial Sequence
  n-mer motif encoding polynucleotide
agcgttgtcaacaccaacatc

SEQ ID NO: 5352 - DNA, 21 bp, Artificial Sequence
  n-mer motif encoding polynucleotide
tctaatgttcatgttgttaat

SEQ ID NO: 5353 - DNA, 21 bp, Artificial Sequence
  n-mer motif encoding polynucleotide
tcggttgataagccgccgggg

SEQ ID NO: 5354 - DNA, 21 bp, Artificial Sequence
  n-mer motif encoding polynucleotide
gaccgcacctactcaaacaca

SEQ ID NO: 5355 - DNA, 21 bp, Artificial Sequence
  n-mer motif encoding polynucleotide
tactccggagaactaaacaaa

SEQ ID NO: 5356 - DNA, 21 bp, Artificial Sequence
  n-mer motif encoding polynucleotide
tatgataagactttgagtgtt

SEQ ID NO: 5357 - DNA, 21 bp, Artificial Sequence
  n-mer motif encoding polynucleotide
cacaccgccacccttagcagc

SEQ ID NO: 5358 - DNA, 21 bp, Artificial Sequence
  n-mer motif encoding polynucleotide
gctctggagagggctcagtat

SEQ ID NO: 5359 - DNA, 21 bp, Artificial Sequence
  n-mer motif encoding polynucleotide
ggtacgagtgataattatagg

SEQ ID NO: 5360 - DNA, 21 bp, Artificial Sequence
  n-mer motif encoding polynucleotide
catgtgaatagtagggatctt

SEQ ID NO: 5361 - DNA, 21 bp, Artificial Sequence
  n-mer motif encoding polynucleotide
tcgtcagacgttaccagacaa

SEQ ID NO: 5362 - DNA, 21 bp, Artificial Sequence
  n-mer motif encoding polynucleotide
gctcatcatatgacgacggag

SEQ ID NO: 5363 - DNA, 21 bp, Artificial Sequence
  n-mer motif encoding polynucleotide
gaggtgtctagggatggtctg

SEQ ID NO: 5364 - DNA, 21 bp, Artificial Sequence
  n-mer motif encoding polynucleotide
gtgggccgtgacgcagaagct

SEQ ID NO: 5365 - DNA, 21 bp, Artificial Sequence
  n-mer motif encoding polynucleotide
gcacaccaaaaagacctacgc

SEQ ID NO: 5366 - DNA, 21 bp, Artificial Sequence
  n-mer motif encoding polynucleotide
agtgttctgagtagttcgact

SEQ ID NO: 5367 - DNA, 21 bp, Artificial Sequence
  n-mer motif encoding polynucleotide
ctgggtacgctgcttagtcag

SEQ ID NO: 5368 - DNA, 21 bp, Artificial Sequence
  n-mer motif encoding polynucleotide
tcacaaaaaccaatcgacgac

SEQ ID NO: 5369 - DNA, 21 bp, Artificial Sequence
  n-mer motif encoding polynucleotide
gataatgtgcatgggcaggtg

SEQ ID NO: 5370 - DNA, 21 bp, Artificial Sequence
  n-mer motif encoding polynucleotide
ggttcgcacaacgggccgaca

SEQ ID NO: 5371 - DNA, 21 bp, Artificial Sequence
  n-mer motif encoding polynucleotide
atctccggtagtagcagtcta

SEQ ID NO: 5372 - DNA, 21 bp, Artificial Sequence
  n-mer motif encoding polynucleotide
ggttttcatattaatggtgag

SEQ ID NO: 5373 - DNA, 21 bp, Artificial Sequence
  n-mer motif encoding polynucleotide
atgagtgatgggcattcgaag

SEQ ID NO: 5374 - DNA, 21 bp, Artificial Sequence
  n-mer motif encoding polynucleotide
actgttggtggtaatcatcat

SEQ ID NO: 5375 - DNA, 21 bp, Artificial Sequence
  n-mer motif encoding polynucleotide
aatgctactccgccgaatcat

SEQ ID NO: 5376 - DNA, 21 bp, Artificial Sequence
  n-mer motif encoding polynucleotide
acgggtatgaatagtaataag

SEQ ID NO: 5377 - DNA, 21 bp, Artificial Sequence
  n-mer motif encoding polynucleotide
atcgaagcctactcacgagac

SEQ ID NO: 5378 - DNA, 21 bp, Artificial Sequence
  n-mer motif encoding polynucleotide
cgcgaccgtcaagactcggta

SEQ ID NO: 5379 - DNA, 21 bp, Artificial Sequence
  n-mer motif encoding polynucleotide
cacacggttcaaatacgcgaa

SEQ ID NO: 5380 - DNA, 21 bp, Artificial Sequence
  n-mer motif encoding polynucleotide
actttgacgcagactgggatg

SEQ ID NO: 5381 - DNA, 21 bp, Artificial Sequence
  n-mer motif encoding polynucleotide
attaataattttaatactctg

SEQ ID NO: 5382 - DNA, 21 bp, Artificial Sequence
  n-mer motif encoding polynucleotide
gtagccgcgggaccagaagcg

SEQ ID NO: 5383 - DNA, 21 bp, Artificial Sequence
  n-mer motif encoding polynucleotide
gatggtaagaatagttatgcg

SEQ ID NO: 5384 - DNA, 21 bp, Artificial Sequence
  n-mer motif encoding polynucleotide
tccaggcaagaaaacttctcc

SEQ ID NO: 5385 - DNA, 21 bp, Artificial Sequence
  n-mer motif encoding polynucleotide
tctaacagcagtgttgcggta

SEQ ID NO: 5386 - DNA, 21 bp, Artificial Sequence
  n-mer motif encoding polynucleotide
gatcatagtaagcagagttcg

SEQ ID NO: 5387 - DNA, 21 bp, Artificial Sequence
  n-mer motif encoding polynucleotide
ttgagtggtgctggtagtcag

SEQ ID NO: 5388 - DNA, 21 bp, Artificial Sequence
  n-mer motif encoding polynucleotide
ggttggagtaataatgagttg

SEQ ID NO: 5389 - DNA, 21 bp, Artificial Sequence
  n-mer motif encoding polynucleotide
ctaatacgaggttccatggaa

SEQ ID NO: 5390 - DNA, 21 bp, Artificial Sequence
  n-mer motif encoding polynucleotide
aatacttatactgctggtaag

SEQ ID NO: 5391 - DNA, 21 bp, Artificial Sequence
  n-mer motif encoding polynucleotide
actcgtggcgacatggaattc

SEQ ID NO: 5392 - DNA, 21 bp, Artificial Sequence
  n-mer motif encoding polynucleotide
ctcatgtcagggaaagaaaac

SEQ ID NO: 5393 - DNA, 21 bp, Artificial Sequence
  n-mer motif encoding polynucleotide
aaggatactaatcagcagatt

SEQ ID NO: 5394 - DNA, 21 bp, Artificial Sequence
  n-mer motif encoding polynucleotide
cacaacgtcggcctaggacac

SEQ ID NO: 5395 - DNA, 21 bp, Artificial Sequence
  n-mer motif encoding polynucleotide
cctgatcagcctggtccttct

SEQ ID NO: 5396 - DNA, 21 bp, Artificial Sequence
  n-mer motif encoding polynucleotide
atgcaaagagaagcagccaac

SEQ ID NO: 5397 - DNA, 21 bp, Artificial Sequence
  n-mer motif encoding polynucleotide
gggcagcgtacgacgaatgat

SEQ ID NO: 5398 - DNA, 21 bp, Artificial Sequence
  n-mer motif encoding polynucleotide
aaacacacagaaaacgggacc

SEQ ID NO: 5399 - DNA, 21 bp, Artificial Sequence
  n-mer motif encoding polynucleotide
ttagacgtgacgagaatgaga

SEQ ID NO: 5400 - DNA, 21 bp, Artificial Sequence
  n-mer motif encoding polynucleotide
acgttggatcggaatcagact

SEQ ID NO: 5401 - DNA, 21 bp, Artificial Sequence
  n-mer motif encoding polynucleotide
atcaacgccggcaactaccga

SEQ ID NO: 5402 - DNA, 21 bp, Artificial Sequence
  n-mer motif encoding polynucleotide
gccgtagaccaatcacgtttg

SEQ ID NO: 5403 - DNA, 21 bp, Artificial Sequence
  n-mer motif encoding polynucleotide
gctcttgggcatcaggggaat

SEQ ID NO: 5404 - DNA, 21 bp, Artificial Sequence
  n-mer motif encoding polynucleotide
cttccgcgtcatgatcagtat

SEQ ID NO: 5405 - DNA, 21 bp, Artificial Sequence
  n-mer motif encoding polynucleotide
atttctgggtcgtcgtctctt

SEQ ID NO: 5406 - DNA, 21 bp, Artificial Sequence
  n-mer motif encoding polynucleotide
tggaatacgaatatggcgatt

SEQ ID NO: 5407 - DNA, 21 bp, Artificial Sequence
  n-mer motif encoding polynucleotide
atgtcggatcgtacttctgat

SEQ ID NO: 5408 - DNA, 21 bp, Artificial Sequence
  n-mer motif encoding polynucleotide
acaagggaatcaatgtccatc

SEQ ID NO: 5409 - DNA, 21 bp, Artificial Sequence
  n-mer motif encoding polynucleotide
cagcggggggagcttcctgcg

SEQ ID NO: 5410 - DNA, 21 bp, Artificial Sequence
  n-mer motif encoding polynucleotide
tcgtctgatcctaaggggcag

SEQ ID NO: 5411 - DNA, 21 bp, Artificial Sequence
  n-mer motif encoding polynucleotide
ccgagtgataggactacttat

SEQ ID NO: 5412 - DNA, 21 bp, Artificial Sequence
  n-mer motif encoding polynucleotide
tcttcttctgatagtccgcgt

SEQ ID NO: 5413 - DNA, 21 bp, Artificial Sequence
  n-mer motif encoding polynucleotide
gtattacactctgtatcagca

SEQ ID NO: 5414 - DNA, 21 bp, Artificial Sequence
  n-mer motif encoding polynucleotide
agtatgcaatcatacaccatg

SEQ ID NO: 5415 - DNA, 21 bp, Artificial Sequence
  n-mer motif encoding polynucleotide
tctctgcaactcacagcgggt

SEQ ID NO: 5416 - DNA, 21 bp, Artificial Sequence
  n-mer motif encoding polynucleotide
aacaacgtaaacccgtactcg

SEQ ID NO: 5417 - DNA, 21 bp, Artificial Sequence
  n-mer motif encoding polynucleotide
cttgcgaatggtatgacggct

SEQ ID NO: 5418 - DNA, 21 bp, Artificial Sequence
  n-mer motif encoding polynucleotide
ggaatcacaggatcaacagga

SEQ ID NO: 5419 - DNA, 21 bp, Artificial Sequence
  n-mer motif encoding polynucleotide
atgcttgttcagaatactcct

SEQ ID NO: 5420 - DNA, 21 bp, Artificial Sequence
  n-mer motif encoding polynucleotide
gatgcgaatgcgggtacgagg

SEQ ID NO: 5421 - DNA, 21 bp, Artificial Sequence
  n-mer motif encoding polynucleotide
gaaaccggagctatgacctct

SEQ ID NO: 5422 - DNA, 21 bp, Artificial Sequence
  n-mer motif encoding polynucleotide
atacaaactactacaaaatgc

SEQ ID NO: 5423 - DNA, 21 bp, Artificial Sequence
  n-mer motif encoding polynucleotide
gcgcagcagagtcttcatggt

SEQ ID NO: 5424 - DNA, 21 bp, Artificial Sequence
  n-mer motif encoding polynucleotide
attgatagtacttggaatacg

SEQ ID NO: 5425 - DNA, 21 bp, Artificial Sequence
  n-mer motif encoding polynucleotide
accgaatcgcaaaccatgagg

SEQ ID NO: 5426 - DNA, 21 bp, Artificial Sequence
  n-mer motif encoding polynucleotide
ttgatccaaacgcaaggcacg

SEQ ID NO: 5427 - DNA, 21 bp, Artificial Sequence
  n-mer motif encoding polynucleotide
atagtaaacataactcaatcg

SEQ ID NO: 5428 - DNA, 21 bp, Artificial Sequence
  n-mer motif encoding polynucleotide
gtggcggtgtctaatacgcct

SEQ ID NO: 5429 - DNA, 21 bp, Artificial Sequence
  n-mer motif encoding polynucleotide
ggtcatagggattcgggtggt

SEQ ID NO: 5430 - DNA, 21 bp, Artificial Sequence
  n-mer motif encoding polynucleotide
cggaatgagaatcttaataat

SEQ ID NO: 5431 - DNA, 21 bp, Artificial Sequence
  n-mer motif encoding polynucleotide
gtcatgcaacgatctgcacaa

SEQ ID NO: 5432 - DNA, 21 bp, Artificial Sequence
  n-mer motif encoding polynucleotide
gtctcgggtccggtatcggtc

SEQ ID NO: 5433 - DNA, 21 bp, Artificial Sequence
  n-mer motif encoding polynucleotide
ggggatattcagagtcatagt

SEQ ID NO: 5434 - DNA, 21 bp, Artificial Sequence
  n-mer motif encoding polynucleotide
gttgagaagcctctggagact

SEQ ID NO: 5435 - DNA, 21 bp, Artificial Sequence
  n-mer motif encoding polynucleotide
ggtgttcagatgactgcgggg

SEQ ID NO: 5436 - DNA, 21 bp, Artificial Sequence
  n-mer motif encoding polynucleotide
accacaaaaacgacatctatg

SEQ ID NO: 5437 - DNA, 21 bp, Artificial Sequence
  n-mer motif encoding polynucleotide
cctgggaatccgtctagtaat

SEQ ID NO: 5438 - DNA, 21 bp, Artificial Sequence
  n-mer motif encoding polynucleotide
gcttcgcggcctgcggctcag

SEQ ID NO: 5439 - DNA, 21 bp, Artificial Sequence
  n-mer motif encoding polynucleotide
gttcatgatcagggggctggg

SEQ ID NO: 5440 - DNA, 21 bp, Artificial Sequence
  n-mer motif encoding polynucleotide
tcaggttcggaataccgtacc

SEQ ID NO: 5441 - DNA, 21 bp, Artificial Sequence
  n-mer motif encoding polynucleotide
tacgtggacgacaacagtcgc

SEQ ID NO: 5442 - DNA, 21 bp, Artificial Sequence
  n-mer motif encoding polynucleotide
atggccggtgaccaagaactc

SEQ ID NO: 5443 - DNA, 21 bp, Artificial Sequence
  n-mer motif encoding polynucleotide
cctttgcacaacatacctcct

SEQ ID NO: 5444 - DNA, 21 bp, Artificial Sequence
  n-mer motif encoding polynucleotide
agtgggattggtacttattct

SEQ ID NO: 5445 - DNA, 21 bp, Artificial Sequence
  n-mer motif encoding polynucleotide
tcgaacgcagacatcctcgcc

SEQ ID NO: 5446 - DNA, 21 bp, Artificial Sequence
  n-mer motif encoding polynucleotide
agtcacaaccaagtaaacgta

SEQ ID NO: 5447 - DNA, 21 bp, Artificial Sequence
  n-mer motif encoding polynucleotide
cagcattctccgaagccggtt

SEQ ID NO: 5448 - DNA, 21 bp, Artificial Sequence
  n-mer motif encoding polynucleotide
tccgcaaacaacatagccccc

SEQ ID NO: 5449 - DNA, 21 bp, Artificial Sequence
  n-mer motif encoding polynucleotide
gaagaaacacggaccagaatg

SEQ ID NO: 5450 - DNA, 21 bp, Artificial Sequence
  n-mer motif encoding polynucleotide
ctgtctaattcgattacgcct

SEQ ID NO: 5451 - DNA, 21 bp, Artificial Sequence
  n-mer motif encoding polynucleotide
agtgctttgaatagtgtggat

SEQ ID NO: 5452 - DNA, 21 bp, Artificial Sequence
  n-mer motif encoding polynucleotide
actaatcttgctgttacgctg

SEQ ID NO: 5453 - DNA, 21 bp, Artificial Sequence
  n-mer motif encoding polynucleotide
cagtcgacgctgaataggcct

SEQ ID NO: 5454 - DNA, 21 bp, Artificial Sequence
  n-mer motif encoding polynucleotide
atagaacacatgcttagaccc

SEQ ID NO: 5455 - DNA, 21 bp, Artificial Sequence
  n-mer motif encoding polynucleotide
ccgactcctaatgagcatatg

SEQ ID NO: 5456 - DNA, 21 bp, Artificial Sequence
  n-mer motif encoding polynucleotide
attaatgagattggtaggatg

SEQ ID NO: 5457 - DNA, 21 bp, Artificial Sequence
  n-mer motif encoding polynucleotide
aacaacgacaacgtctacgtg

SEQ ID NO: 5458 - DNA, 21 bp, Artificial Sequence
  n-mer motif encoding polynucleotide
atagtccacaccccgcaagtg

SEQ ID NO: 5459 - DNA, 21 bp, Artificial Sequence
  n-mer motif encoding polynucleotide
cataagagtgagagtcataat

SEQ ID NO: 5460 - DNA, 21 bp, Artificial Sequence
  n-mer motif encoding polynucleotide
tcatcgtcagactcacccaga

SEQ ID NO: 5461 - DNA, 21 bp, Artificial Sequence
  n-mer motif encoding polynucleotide
tactctacagaagcacgagtc

SEQ ID NO: 5462 - DNA, 21 bp, Artificial Sequence
  n-mer motif encoding polynucleotide
acctcgggtgaccggtacacg

SEQ ID NO: 5463 - DNA, 21 bp, Artificial Sequence
  n-mer motif encoding polynucleotide
gagaagaatctgactaatgct

SEQ ID NO: 5464 - DNA, 21 bp, Artificial Sequence
  n-mer motif encoding polynucleotide
acaagggaccaaaggtctaca

SEQ ID NO: 5465 - DNA, 21 bp, Artificial Sequence
  n-mer motif encoding polynucleotide
gcgactgataagatgactcct

SEQ ID NO: 5466 - DNA, 21 bp, Artificial Sequence
  n-mer motif encoding polynucleotide
aatagttatactgctgggaag

SEQ ID NO: 5467 - DNA, 21 bp, Artificial Sequence
  n-mer motif encoding polynucleotide
acgctggatactaaggatctt

SEQ ID NO: 5468 - DNA, 21 bp, Artificial Sequence
  n-mer motif encoding polynucleotide
gcatccaacgggcaagttaac

SEQ ID NO: 5469 - DNA, 21 bp, Artificial Sequence
  n-mer motif encoding polynucleotide
acctcaatatcgtcgcaaagc

SEQ ID NO: 5470 - DNA, 21 bp, Artificial Sequence
  n-mer motif encoding polynucleotide
gataatagtcctgctaatcat

SEQ ID NO: 5471 - DNA, 21 bp, Artificial Sequence
  n-mer motif encoding polynucleotide
aactccagggaaatgggtgta

SEQ ID NO: 5472 - DNA, 21 bp, Artificial Sequence
  n-mer motif encoding polynucleotide
accagcgcgtctgaaaactgg

SEQ ID NO: 5473 - DNA, 21 bp, Artificial Sequence
  n-mer motif encoding polynucleotide
actgtaggatcctcatacgct

SEQ ID NO: 5474 - DNA, 21 bp, Artificial Sequence
  n-mer motif encoding polynucleotide
caacaatcacaaaactctata

SEQ ID NO: 5475 - DNA, 21 bp, Artificial Sequence
  n-mer motif encoding polynucleotide
cttcgggatgggattgcttct

SEQ ID NO: 5476 - DNA, 21 bp, Artificial Sequence
  n-mer motif encoding polynucleotide
gtgcaaaaaacgacggcttgg

SEQ ID NO: 5477 - DNA, 21 bp, Artificial Sequence
  n-mer motif encoding polynucleotide
atgagtacggttcttcgggag

SEQ ID NO: 5478 - DNA, 21 bp, Artificial Sequence
  n-mer motif encoding polynucleotide
agtatggatgctcggttgacg

SEQ ID NO: 5479 - DNA, 21 bp, Artificial Sequence
  n-mer motif encoding polynucleotide
ggcgcccgtacaatcttagac

SEQ ID NO: 5480 - DNA, 21 bp, Artificial Sequence
  n-mer motif encoding polynucleotide
cacgaaagccactacgtgtca

SEQ ID NO: 5481 - DNA, 21 bp, Artificial Sequence
  n-mer motif encoding polynucleotide
cttgagggtcagaataagacg

SEQ ID NO: 5482 - DNA, 21 bp, Artificial Sequence
  n-mer motif encoding polynucleotide
cgggacttgagacccgtgacg

SEQ ID NO: 5483 - DNA, 21 bp, Artificial Sequence
  n-mer motif encoding polynucleotide
cagattttgaattatagtgtg

SEQ ID NO: 5484 - DNA, 21 bp, Artificial Sequence
  n-mer motif encoding polynucleotide
ataagtgtaggtgtgtccgta

SEQ ID NO: 5485 - DNA, 21 bp, Artificial Sequence
  n-mer motif encoding polynucleotide
aaggcgggtgagtatagggat

SEQ ID NO: 5486 - DNA, 21 bp, Artificial Sequence
  n-mer motif encoding polynucleotide
cttactacgaatggtatgctg

SEQ ID NO: 5487 - DNA, 21 bp, Artificial Sequence
  n-mer motif encoding polynucleotide
actagtaattatatgcatgag

SEQ ID NO: 5488 - DNA, 21 bp, Artificial Sequence
  n-mer motif encoding polynucleotide
acccacaactctacaggcctt

SEQ ID NO: 5489 - DNA, 21 bp, Artificial Sequence
  n-mer motif encoding polynucleotide
aataatgttgttagggatgat

SEQ ID NO: 5490 - DNA, 21 bp, Artificial Sequence
  n-mer motif encoding polynucleotide
agtgggacgtatgctagtcgt

SEQ ID NO: 5491 - DNA, 21 bp, Artificial Sequence
  n-mer motif encoding polynucleotide
ctgtctcacgccatggaccgg

SEQ ID NO: 5492 - DNA, 21 bp, Artificial Sequence
  n-mer motif encoding polynucleotide
aattggaattctgagggtacg

SEQ ID NO: 5493 - DNA, 21 bp, Artificial Sequence
  n-mer motif encoding polynucleotide
agtctgcgtccaaccctacct

SEQ ID NO: 5494 - DNA, 21 bp, Artificial Sequence
  n-mer motif encoding polynucleotide
taccaaacgggagacaaagac

SEQ ID NO: 5495 - DNA, 21 bp, Artificial Sequence
  n-mer motif encoding polynucleotide
cgcagcgacaaaggaacgttg

SEQ ID NO: 5496 - DNA, 21 bp, Artificial Sequence
  n-mer motif encoding polynucleotide
tctaccatcggcaacagcacg

SEQ ID NO: 5497 - DNA, 21 bp, Artificial Sequence
  n-mer motif encoding polynucleotide
gaaaacaacatgcaacacggc

SEQ ID NO: 5498 - DNA, 21 bp, Artificial Sequence
  n-mer motif encoding polynucleotide
aagtatacggagtcgaatgcg

SEQ ID NO: 5499 - DNA, 21 bp, Artificial Sequence
  n-mer motif encoding polynucleotide
ccaacaaacaacttaagtatg

SEQ ID NO: 5500 - DNA, 21 bp, Artificial Sequence
  n-mer motif encoding polynucleotide
tgcaaaaacaactcagaatgc

SEQ ID NO: 5501 - DNA, 21 bp, Artificial Sequence
  n-mer motif encoding polynucleotide
acggttaatgcggatgggtcg

SEQ ID NO: 5502 - DNA, 21 bp, Artificial Sequence
  n-mer motif encoding polynucleotide
ttttctggtcaggcgttggct

SEQ ID NO: 5503 - DNA, 21 bp, Artificial Sequence
  n-mer motif encoding polynucleotide
aatcatattaggaatcctatg

SEQ ID NO: 5504 - DNA, 21 bp, Artificial Sequence
  n-mer motif encoding polynucleotide
atggtgaattcggagaatact

SEQ ID NO: 5505 - DNA, 21 bp, Artificial Sequence
  n-mer motif encoding polynucleotide
actgatgggccgcgtctggct

SEQ ID NO: 5506 - DNA, 21 bp, Artificial Sequence
  n-mer motif encoding polynucleotide
ttcaacgggtacgtcatggca

SEQ ID NO: 5507 - DNA, 21 bp, Artificial Sequence
  n-mer motif encoding polynucleotide
aatgcgaatgggcctgtgagt

SEQ ID NO: 5508 - DNA, 21 bp, Artificial Sequence
  n-mer motif encoding polynucleotide
agtacgagtcaggagaatagg

SEQ ID NO: 5509 - DNA, 21 bp, Artificial Sequence
  n-mer motif encoding polynucleotide
caagggactctcttgtctcca

SEQ ID NO: 5510 - DNA, 21 bp, Artificial Sequence
  n-mer motif encoding polynucleotide
ctaatcacagccaccactaac

SEQ ID NO: 5511 - DNA, 21 bp, Artificial Sequence
  n-mer motif encoding polynucleotide
tctggcgtctcgaaagaacgg

SEQ ID NO: 5512 - DNA, 21 bp, Artificial Sequence
  n-mer motif encoding polynucleotide
tctacttcaataggagtggta

SEQ ID NO: 5513 - DNA, 21 bp, Artificial Sequence
  n-mer motif encoding polynucleotide
tctcatgtgactgttacggat

SEQ ID NO: 5514 - DNA, 21 bp, Artificial Sequence
  n-mer motif encoding polynucleotide
tctaataatctgaatcaggag

SEQ ID NO: 5515 - DNA, 21 bp, Artificial Sequence
  n-mer motif encoding polynucleotide
gcaaaccacgacaacatcgtg

SEQ ID NO: 5516 - DNA, 21 bp, Artificial Sequence
  n-mer motif encoding polynucleotide
gacacgtcctccggcaacagg

SEQ ID NO: 5517 - DNA, 21 bp, Artificial Sequence
  n-mer motif encoding polynucleotide
gtggttcctatgcctactact

SEQ ID NO: 5518 - DNA, 21 bp, Artificial Sequence
  n-mer motif encoding polynucleotide
cttactaataattttaaggat

SEQ ID NO: 5519 - DNA, 21 bp, Artificial Sequence
  n-mer motif encoding polynucleotide
tcttcgcctactaagggtact

SEQ ID NO: 5520 - DNA, 21 bp, Artificial Sequence
  n-mer motif encoding polynucleotide
gatattccgtctgataatacg

SEQ ID NO: 5521 - DNA, 21 bp, Artificial Sequence
  n-mer motif encoding polynucleotide
tacacgggattcgaattgaga

SEQ ID NO: 5522 - DNA, 21 bp, Artificial Sequence
  n-mer motif encoding polynucleotide
aactcaggtaacaaccccatc

SEQ ID NO: 5523 - DNA, 21 bp, Artificial Sequence
  n-mer motif encoding polynucleotide
acgacccgaaacgaacactcg

SEQ ID NO: 5524 - DNA, 21 bp, Artificial Sequence
  n-mer motif encoding polynucleotide
aatgtgggtaatactcttggg

SEQ ID NO: 5525 - DNA, 21 bp, Artificial Sequence
  n-mer motif encoding polynucleotide
taccacacccaccaagtcgca

SEQ ID NO: 5526 - DNA, 21 bp, Artificial Sequence
  n-mer motif encoding polynucleotide
ggtagtgcgagtaatagtggt

SEQ ID NO: 5527 - DNA, 21 bp, Artificial Sequence
  n-mer motif encoding polynucleotide
gggaagaatcagcctactccg

SEQ ID NO: 5528 - DNA, 21 bp, Artificial Sequence
  n-mer motif encoding polynucleotide
ttcaccgccactttaggaacc

SEQ ID NO: 5529 - DNA, 21 bp, Artificial Sequence
  n-mer motif encoding polynucleotide
atgaaccaaatgggcggcctg

SEQ ID NO: 5530 - DNA, 21 bp, Artificial Sequence
  n-mer motif encoding polynucleotide
aacgtgtcactaacgcaaacg

SEQ ID NO: 5531 - DNA, 21 bp, Artificial Sequence
  n-mer motif encoding polynucleotide
tcgtctagcaacacaaacgct

SEQ ID NO: 5532 - DNA, 21 bp, Artificial Sequence
  n-mer motif encoding polynucleotide
actaattctaatcagagttcg

SEQ ID NO: 5533 - DNA, 21 bp, Artificial Sequence
  n-mer motif encoding polynucleotide
ataagtcacgaccttaaatac

SEQ ID NO: 5534 - DNA, 21 bp, Artificial Sequence
  n-mer motif encoding polynucleotide
gattcgacgtatgttttggct

SEQ ID NO: 5535 - DNA, 21 bp, Artificial Sequence
  n-mer motif encoding polynucleotide
atgaacaccggctcttcgagt

SEQ ID NO: 5536 - DNA, 21 bp, Artificial Sequence
  n-mer motif encoding polynucleotide
gccggaaactaccaatcatca

SEQ ID NO: 5537 - DNA, 21 bp, Artificial Sequence
  n-mer motif encoding polynucleotide
acgatttataatatgggtccg

SEQ ID NO: 5538 - DNA, 21 bp, Artificial Sequence
  n-mer motif encoding polynucleotide
gtatcaacgacaacggaccgg

SEQ ID NO: 5539 - DNA, 21 bp, Artificial Sequence
  n-mer motif encoding polynucleotide
ggggtgactgttagggagctt

SEQ ID NO: 5540 - DNA, 21 bp, Artificial Sequence
  n-mer motif encoding polynucleotide
gatattactaatcagtcgtat

SEQ ID NO: 5541 - DNA, 21 bp, Artificial Sequence
  n-mer motif encoding polynucleotide
aatcagtcgcttactatggat

SEQ ID NO: 5542 - DNA, 21 bp, Artificial Sequence
  n-mer motif encoding polynucleotide
acgaattataatattggtccg

SEQ ID NO: 5543 - DNA, 21 bp, Artificial Sequence
  n-mer motif encoding polynucleotide
cgtggtacggaggggacgccg

SEQ ID NO: 5544 - DNA, 21 bp, Artificial Sequence
  n-mer motif encoding polynucleotide
cccataacacgggaatcggga

SEQ ID NO: 5545 - DNA, 21 bp, Artificial Sequence
  n-mer motif encoding polynucleotide
accggacaagcgggcggatcg

SEQ ID NO: 5546 - DNA, 21 bp, Artificial Sequence
  n-mer motif encoding polynucleotide
atgactaaacacgacgcgacg

SEQ ID NO: 5547 - DNA, 21 bp, Artificial Sequence
  n-mer motif encoding polynucleotide
cctataccccacggttcatcc

SEQ ID NO: 5548 - DNA, 21 bp, Artificial Sequence
  n-mer motif encoding polynucleotide
acgactggggggacggggatg

SEQ ID NO: 5549 - DNA, 21 bp, Artificial Sequence
  n-mer motif encoding polynucleotide
ctaaccgaatctgtgagaaac

SEQ ID NO: 5550 - DNA, 21 bp, Artificial Sequence
  n-mer motif encoding polynucleotide
agtagtaatctgactttgtct

SEQ ID NO: 5551 - DNA, 21 bp, Artificial Sequence
  n-mer motif encoding polynucleotide
ttgaataattctgcgactgtt

SEQ ID NO: 5552 - DNA, 21 bp, Artificial Sequence
  n-mer motif encoding polynucleotide
gcatacggatcgtccggaaga

SEQ ID NO: 5553 - DNA, 21 bp, Artificial Sequence
  n-mer motif encoding polynucleotide
gtttcttatgataatgggtcg

SEQ ID NO: 5554 - DNA, 21 bp, Artificial Sequence
  n-mer motif encoding polynucleotide
ccgagtcagagtaggtcgctt

SEQ ID NO: 5555 - DNA, 21 bp, Artificial Sequence
  n-mer motif encoding polynucleotide
gtcctggttaacgtacacaac

SEQ ID NO: 5556 - DNA, 21 bp, Artificial Sequence
  n-mer motif encoding polynucleotide
ttgatgactggtactgcgtcg

SEQ ID NO: 5557 - DNA, 21 bp, Artificial Sequence
  n-mer motif encoding polynucleotide
gctgctggtaatcctactcgt

SEQ ID NO: 5558 - DNA, 21 bp, Artificial Sequence
  n-mer motif encoding polynucleotide
tccgcgcaatctttcgtagtt

SEQ ID NO: 5559 - DNA, 21 bp, Artificial Sequence
  n-mer motif encoding polynucleotide
caagaccaaacgagcaaccgt

SEQ ID NO: 5560 - DNA, 21 bp, Artificial Sequence
  n-mer motif encoding polynucleotide
cagtcgattgggcatccggtg

SEQ ID NO: 5561 - DNA, 21 bp, Artificial Sequence
  n-mer motif encoding polynucleotide
gctggggtgcgtgagtcgttt

SEQ ID NO: 5562 - DNA, 21 bp, Artificial Sequence
  n-mer motif encoding polynucleotide
aatactaattatgcgatgcat

SEQ ID NO: 5563 - DNA, 21 bp, Artificial Sequence
  n-mer motif encoding polynucleotide
gagcggagtacgcataatgtt

SEQ ID NO: 5564 - DNA, 21 bp, Artificial Sequence
  n-mer motif encoding polynucleotide
atgtccggatccatgatatca

SEQ ID NO: 5565 - DNA, 21 bp, Artificial Sequence
  n-mer motif encoding polynucleotide
tctggccaaggattctcggca

SEQ ID NO: 5566 - DNA, 21 bp, Artificial Sequence
  n-mer motif encoding polynucleotide
acattcactactctgggcaaa

SEQ ID NO: 5567 - DNA, 21 bp, Artificial Sequence
  n-mer motif encoding polynucleotide
gacgcaaacgctggcacaaga

SEQ ID NO: 5568 - DNA, 21 bp, Artificial Sequence
  n-mer motif encoding polynucleotide
agggatacggctaagggggtg

SEQ ID NO: 5569 - DNA, 21 bp, Artificial Sequence
  n-mer motif encoding polynucleotide
gtgcggtctggtaataagccg

SEQ ID NO: 5570 - DNA, 21 bp, Artificial Sequence
  n-mer motif encoding polynucleotide
ccccaatggggaactgacccg

SEQ ID NO: 5571 - DNA, 21 bp, Artificial Sequence
  n-mer motif encoding polynucleotide
gccttccaaaacaccggcgca

SEQ ID NO: 5572 - DNA, 21 bp, Artificial Sequence
  n-mer motif encoding polynucleotide
gcgacgactcagctgatgact

SEQ ID NO: 5573 - DNA, 21 bp, Artificial Sequence
  n-mer motif encoding polynucleotide
acgaacgcgagcgaaggctca

SEQ ID NO: 5574 - DNA, 21 bp, Artificial Sequence
  n-mer motif encoding polynucleotide
atgctcacagaaaccaaagca

SEQ ID NO: 5575 - DNA, 21 bp, Artificial Sequence
  n-mer motif encoding polynucleotide
acgaataatttgctggctcag

SEQ ID NO: 5576 - DNA, 21 bp, Artificial Sequence
  n-mer motif encoding polynucleotide
gatgttttgcttaagaatttt

SEQ ID NO: 5577 - DNA, 21 bp, Artificial Sequence
  n-mer motif encoding polynucleotide
tatacgcctgggcttactgag

SEQ ID NO: 5578 - DNA, 21 bp, Artificial Sequence
  n-mer motif encoding polynucleotide
cggcatgcttcggatgctaat

SEQ ID NO: 5579 - DNA, 21 bp, Artificial Sequence
  n-mer motif encoding polynucleotide
agtaagggtgatcagcttaat

SEQ ID NO: 5580 - DNA, 21 bp, Artificial Sequence
  n-mer motif encoding polynucleotide
gtgctggttactcagaatcat

SEQ ID NO: 5581 - DNA, 21 bp, Artificial Sequence
  n-mer motif encoding polynucleotide
cgacaaggcgacttaaaagaa

SEQ ID NO: 5582 - DNA, 21 bp, Artificial Sequence
  n-mer motif encoding polynucleotide
attcagtcgcagtcgcagttg

SEQ ID NO: 5583 - DNA, 21 bp, Artificial Sequence
  n-mer motif encoding polynucleotide
aaaatagaaagcggaaccata

SEQ ID NO: 5584 - DNA, 21 bp, Artificial Sequence
  n-mer motif encoding polynucleotide
acaactcttagccaacaaagc

SEQ ID NO: 5585 - DNA, 21 bp, Artificial Sequence
  n-mer motif encoding polynucleotide
tttcagttggctagtaatccg

SEQ ID NO: 5586 - DNA, 21 bp, Artificial Sequence
  n-mer motif encoding polynucleotide
tggatttctactgagatgagg

SEQ ID NO: 5587 - DNA, 21 bp, Artificial Sequence
  n-mer motif encoding polynucleotide
gccataacaatcactcaaaaa

SEQ ID NO: 5588 - DNA, 21 bp, Artificial Sequence
  n-mer motif encoding polynucleotide
gttactggtgttgattatgcg

SEQ ID NO: 5589 - DNA, 21 bp, Artificial Sequence
  n-mer motif encoding polynucleotide
ataatagcatcctctaccacg

SEQ ID NO: 5590 - DNA, 21 bp, Artificial Sequence
  n-mer motif encoding polynucleotide
atttatacgaatagtcatgtt

SEQ ID NO: 5591 - DNA, 21 bp, Artificial Sequence
  n-mer motif encoding polynucleotide
aacgacatccccacacgagcc

SEQ ID NO: 5592 - DNA, 21 bp, Artificial Sequence
  n-mer motif encoding polynucleotide
ggcgtaaccaacgcttccaaa

SEQ ID NO: 5593 - DNA, 21 bp, Artificial Sequence
  n-mer motif encoding polynucleotide
aggggtaacactctcgaaatg

SEQ ID NO: 5594 - DNA, 21 bp, Artificial Sequence
  n-mer motif encoding polynucleotide
ggtattaatcatgtggcgtct

SEQ ID NO: 5595 - DNA, 21 bp, Artificial Sequence
  n-mer motif encoding polynucleotide
ttcaacgaaactgccgggcga

SEQ ID NO: 5596 - DNA, 21 bp, Artificial Sequence
  n-mer motif encoding polynucleotide
gcctcgcaatcagaaaaaaac

SEQ ID NO: 5597 - DNA, 21 bp, Artificial Sequence
  n-mer motif encoding polynucleotide
gaacttaacgaaaggaacctc

SEQ ID NO: 5598 - DNA, 21 bp, Artificial Sequence
  n-mer motif encoding polynucleotide
ggagaacaaagccacaaccaa

SEQ ID NO: 5599 - DNA, 21 bp, Artificial Sequence
  n-mer motif encoding polynucleotide
ttgactaatgataataagttg

SEQ ID NO: 5600 - DNA, 21 bp, Artificial Sequence
  n-mer motif encoding polynucleotide
tcttatgggcagggtctggag

SEQ ID NO: 5601 - DNA, 21 bp, Artificial Sequence
  n-mer motif encoding polynucleotide
cacagtgacatgggctcaagc

SEQ ID NO: 5602 - DNA, 21 bp, Artificial Sequence
  n-mer motif encoding polynucleotide
gcgttaaaatccgacagcgcc

SEQ ID NO: 5603 - DNA, 21 bp, Artificial Sequence
  n-mer motif encoding polynucleotide
acgaatctttctcctaagacg

SEQ ID NO: 5604 - DNA, 21 bp, Artificial Sequence
  n-mer motif encoding polynucleotide
gctgatacgaatattattgtg

SEQ ID NO: 5605 - DNA, 21 bp, Artificial Sequence
  n-mer motif encoding polynucleotide
agtgagggtagttcgcggtcg

SEQ ID NO: 5606 - DNA, 21 bp, Artificial Sequence
  n-mer motif encoding polynucleotide
aactctagtaacactggttgg

SEQ ID NO: 5607 - DNA, 21 bp, Artificial Sequence
  n-mer motif encoding polynucleotide
gtaacgaacgaatcccgcgcc

SEQ ID NO: 5608 - DNA, 21 bp, Artificial Sequence
  n-mer motif encoding polynucleotide
gggcggcacacattagcggac

SEQ ID NO: 5609 - DNA, 21 bp, Artificial Sequence
  n-mer motif encoding polynucleotide
gctgttgtgaatgttgcgcag

SEQ ID NO: 5610 - DNA, 21 bp, Artificial Sequence
  n-mer motif encoding polynucleotide
aaaaaaccacaacagtgacta

SEQ ID NO: 5611 - DNA, 21 bp, Artificial Sequence
  n-mer motif encoding polynucleotide
ggcaacgcttccggaaaccca

SEQ ID NO: 5612 - DNA, 21 bp, Artificial Sequence
  n-mer motif encoding polynucleotide
tttgcggctggggcgcatggt

SEQ ID NO: 5613 - DNA, 21 bp, Artificial Sequence
  n-mer motif encoding polynucleotide
ggaggaaaccaaaaccttact

SEQ ID NO: 5614 - DNA, 21 bp, Artificial Sequence
  n-mer motif encoding polynucleotide
catacgcagtcgacgggttat

SEQ ID NO: 5615 - DNA, 21 bp, Artificial Sequence
  n-mer motif encoding polynucleotide
ctattgggaaacgcacccaca

SEQ ID NO: 5616 - DNA, 21 bp, Artificial Sequence
  n-mer motif encoding polynucleotide
gagaaggggaatagtggggtt

SEQ ID NO: 5617 - DNA, 21 bp, Artificial Sequence
  n-mer motif encoding polynucleotide
ggcacggaaccgcgcactgca

SEQ ID NO: 5618 - DNA, 21 bp, Artificial Sequence
  n-mer motif encoding polynucleotide
atgcatgcgcaggagtctcgt

SEQ ID NO: 5619 - DNA, 21 bp, Artificial Sequence
  n-mer motif encoding polynucleotide
ctgatttcgactggtaataat

SEQ ID NO: 5620 - DNA, 21 bp, Artificial Sequence
  n-mer motif encoding polynucleotide
aagaataataattctgattct

SEQ ID NO: 5621 - DNA, 21 bp, Artificial Sequence
  n-mer motif encoding polynucleotide
gggacattagcctcaatgtcc

SEQ ID NO: 5622 - DNA, 21 bp, Artificial Sequence
  n-mer motif encoding polynucleotide
aggattgatacgttgttggtg

SEQ ID NO: 5623 - DNA, 21 bp, Artificial Sequence
  n-mer motif encoding polynucleotide
atttcggggtctcatttgaat

SEQ ID NO: 5624 - DNA, 21 bp, Artificial Sequence
  n-mer motif encoding polynucleotide
acggttgagggttcttatccg

SEQ ID NO: 5625 - DNA, 21 bp, Artificial Sequence
  n-mer motif encoding polynucleotide
acggagtatctggctggtctg

SEQ ID NO: 5626 - DNA, 21 bp, Artificial Sequence
  n-mer motif encoding polynucleotide
tatctggagggtgctcatcgt

SEQ ID NO: 5627 - DNA, 21 bp, Artificial Sequence
  n-mer motif encoding polynucleotide
ttatccgcaacatctacgatg

SEQ ID NO: 5628 - DNA, 21 bp, Artificial Sequence
  n-mer motif encoding polynucleotide
atgcttagtcaggttctgacg

SEQ ID NO: 5629 - DNA, 21 bp, Artificial Sequence
  n-mer motif encoding polynucleotide
gccaggaacgtaatgctgggg

SEQ ID NO: 5630 - DNA, 21 bp, Artificial Sequence
  n-mer motif encoding polynucleotide
cttcatgggaattttagtcag

SEQ ID NO: 5631 - DNA, 21 bp, Artificial Sequence
  n-mer motif encoding polynucleotide
ggccacggaagtgacttgacc

SEQ ID NO: 5632 - DNA, 21 bp, Artificial Sequence
  n-mer motif encoding polynucleotide
ggtgtgaattatcatactacg

SEQ ID NO: 5633 - DNA, 21 bp, Artificial Sequence
  n-mer motif encoding polynucleotide
tatctgcagacgggtactctg

SEQ ID NO: 5634 - DNA, 21 bp, Artificial Sequence
  n-mer motif encoding polynucleotide
gtaaacgggggaaaaccagtc

SEQ ID NO: 5635 - DNA, 21 bp, Artificial Sequence
  n-mer motif encoding polynucleotide
gaagtaggtaaaaccacccac

SEQ ID NO: 5636 - DNA, 21 bp, Artificial Sequence
  n-mer motif encoding polynucleotide
cgacccccgaacgaaaacaga

SEQ ID NO: 5637 - DNA, 21 bp, Artificial Sequence
  n-mer motif encoding polynucleotide
gtggataagaatcatcctttg

SEQ ID NO: 5638 - DNA, 21 bp, Artificial Sequence
  n-mer motif encoding polynucleotide
agtaagtcgactgagattatg

SEQ ID NO: 5639 - DNA, 21 bp, Artificial Sequence
  n-mer motif encoding polynucleotide
accgctcttctatctaactta

SEQ ID NO: 5640 - DNA, 21 bp, Artificial Sequence
  n-mer motif encoding polynucleotide
atgcacacaagtagaccccca

SEQ ID NO: 5641 - DNA, 21 bp, Artificial Sequence
  n-mer motif encoding polynucleotide
actccaactaacgggaaccct

SEQ ID NO: 5642 - DNA, 21 bp, Artificial Sequence
  n-mer motif encoding polynucleotide
acgacgtctgtggagaagact

SEQ ID NO: 5643 - DNA, 21 bp, Artificial Sequence
  n-mer motif encoding polynucleotide
caatacgacgccagccgacaa

SEQ ID NO: 5644 - DNA, 21 bp, Artificial Sequence
  n-mer motif encoding polynucleotide
tacaacgcccacgaatcattc

SEQ ID NO: 5645 - DNA, 21 bp, Artificial Sequence
  n-mer motif encoding polynucleotide
gacaaccaacaagccctagct

SEQ ID NO: 5646 - DNA, 21 bp, Artificial Sequence
  n-mer motif encoding polynucleotide
acgaagagttttaatgatctt

SEQ ID NO: 5647 - DNA, 21 bp, Artificial Sequence
  n-mer motif encoding polynucleotide
ttagccgactcaaacagcaaa

SEQ ID NO: 5648 - DNA, 21 bp, Artificial Sequence
  n-mer motif encoding polynucleotide
ccgagtactcatgggtatgtt

SEQ ID NO: 5649 - DNA, 21 bp, Artificial Sequence
  n-mer motif encoding polynucleotide
caggttcaggggactctgggg

SEQ ID NO: 5650 - DNA, 21 bp, Artificial Sequence
  n-mer motif encoding polynucleotide
ctgactgctgttgcgattagt

SEQ ID NO: 5651 - DNA, 21 bp, Artificial Sequence
  n-mer motif encoding polynucleotide
aggtatgagagtactagtgct

SEQ ID NO: 5652 - DNA, 21 bp, Artificial Sequence
  n-mer motif encoding polynucleotide
gcggatcataatcatattgct

SEQ ID NO: 5653 - DNA, 21 bp, Artificial Sequence
  n-mer motif encoding polynucleotide
tggaatgctgagaatagtaag

SEQ ID NO: 5654 - DNA, 21 bp, Artificial Sequence
  n-mer motif encoding polynucleotide
aactctgtcgtagggaacatc

SEQ ID NO: 5655 - DNA, 21 bp, Artificial Sequence
  n-mer motif encoding polynucleotide
ttcggagcaaccaccacagca

SEQ ID NO: 5656 - DNA, 21 bp, Artificial Sequence
  n-mer motif encoding polynucleotide
gcttcagggtctgaaatgcct

SEQ ID NO: 5657 - DNA, 21 bp, Artificial Sequence
  n-mer motif encoding polynucleotide
gacggaacaaaaagcggaatg

SEQ ID NO: 5658 - DNA, 21 bp, Artificial Sequence
  n-mer motif encoding polynucleotide
tacaccgccgacaaaaaacaa

SEQ ID NO: 5659 - DNA, 21 bp, Artificial Sequence
  n-mer motif encoding polynucleotide
ccgattgctgagaggccttct

SEQ ID NO: 5660 - DNA, 21 bp, Artificial Sequence
  n-mer motif encoding polynucleotide
agcaactcgtacttactcaac

SEQ ID NO: 5661 - DNA, 21 bp, Artificial Sequence
  n-mer motif encoding polynucleotide
acgagagaattgacaaaaaac

SEQ ID NO: 5662 - DNA, 21 bp, Artificial Sequence
  n-mer motif encoding polynucleotide
ctcggaaaccactacacaccc

SEQ ID NO: 5663 - DNA, 21 bp, Artificial Sequence
  n-mer motif encoding polynucleotide
ttgctccaatccatagtggta

SEQ ID NO: 5664 - DNA, 21 bp, Artificial Sequence
  n-mer motif encoding polynucleotide
atgatggcgaataatatgcag

SEQ ID NO: 5665 - DNA, 21 bp, Artificial Sequence
  n-mer motif encoding polynucleotide
ggcgcggacacctcgacccgg

SEQ ID NO: 5666 - DNA, 21 bp, Artificial Sequence
  n-mer motif encoding polynucleotide
gggttcgggcacgtgcccgaa

SEQ ID NO: 5667 - DNA, 21 bp, Artificial Sequence
  n-mer motif encoding polynucleotide
aacgttatgcactcttcctcc

SEQ ID NO: 5668 - DNA, 21 bp, Artificial Sequence
  n-mer motif encoding polynucleotide
tctgcgtcgaaagtggaatac

SEQ ID NO: 5669 - DNA, 21 bp, Artificial Sequence
  n-mer motif encoding polynucleotide
atttcgagttatgatggtaat

SEQ ID NO: 5670 - DNA, 21 bp, Artificial Sequence
  n-mer motif encoding polynucleotide
aaaaaaacgaaaacactaact

SEQ ID NO: 5671 - DNA, 21 bp, Artificial Sequence
  n-mer motif encoding polynucleotide
ggtaccatattaccaaaccaa

SEQ ID NO: 5672 - DNA, 21 bp, Artificial Sequence
  n-mer motif encoding polynucleotide
ttaaacgtcgtaccaacacaa

SEQ ID NO: 5673 - DNA, 21 bp, Artificial Sequence
  n-mer motif encoding polynucleotide
agtagtgttacttcgagggag

SEQ ID NO: 5674 - DNA, 21 bp, Artificial Sequence
  n-mer motif encoding polynucleotide
cccatcaacgtactcacgaca

SEQ ID NO: 5675 - DNA, 21 bp, Artificial Sequence
  n-mer motif encoding polynucleotide
ggggataaggcgagtttggcg

SEQ ID NO: 5676 - DNA, 21 bp, Artificial Sequence
  n-mer motif encoding polynucleotide
aggatgtcggagagttctgat

SEQ ID NO: 5677 - DNA, 21 bp, Artificial Sequence
  n-mer motif encoding polynucleotide
aatcttttgacttcgtcgcct

SEQ ID NO: 5678 - DNA, 21 bp, Artificial Sequence
  n-mer motif encoding polynucleotide
tcgcggctatcacaagacccc

SEQ ID NO: 5679 - DNA, 21 bp, Artificial Sequence
  n-mer motif encoding polynucleotide
tggtcgaatgctcagagtccg

SEQ ID NO: 5680 - DNA, 21 bp, Artificial Sequence
  n-mer motif encoding polynucleotide
ggcagacaccttcaatcggac

SEQ ID NO: 5681 - DNA, 21 bp, Artificial Sequence
  n-mer motif encoding polynucleotide
atgagtctcgcctccacccaa

SEQ ID NO: 5682 - DNA, 21 bp, Artificial Sequence
  n-mer motif encoding polynucleotide
atgagtacggttcttcgcgag

SEQ ID NO: 5683 - DNA, 21 bp, Artificial Sequence
  n-mer motif encoding polynucleotide
tctaaatctgaaaacctgcaa

SEQ ID NO: 5684 - DNA, 21 bp, Artificial Sequence
  n-mer motif encoding polynucleotide
tggacggaagggggctcagga

SEQ ID NO: 5685 - DNA, 21 bp, Artificial Sequence
  n-mer motif encoding polynucleotide
tcgactacggtttggactgct

SEQ ID NO: 5686 - DNA, 21 bp, Artificial Sequence
  n-mer motif encoding polynucleotide
gttagtttggagagtcggttg

SEQ ID NO: 5687 - DNA, 21 bp, Artificial Sequence
  n-mer motif encoding polynucleotide
tctatgtatgggcaggctggg

SEQ ID NO: 5688 - DNA, 21 bp, Artificial Sequence
  n-mer motif encoding polynucleotide
actaatacgcagaataatccg

SEQ ID NO: 5689 - DNA, 21 bp, Artificial Sequence
  n-mer motif encoding polynucleotide
gtcggtgacaggaacttggtc

SEQ ID NO: 5690 - DNA, 21 bp, Artificial Sequence
  n-mer motif encoding polynucleotide
ctcgcccacaactacttaagc

SEQ ID NO: 5691 - DNA, 21 bp, Artificial Sequence
  n-mer motif encoding polynucleotide
tggacagctaaccaaggctta

SEQ ID NO: 5692 - DNA, 21 bp, Artificial Sequence
  n-mer motif encoding polynucleotide
gtcttccgggaaggcatcgtg

SEQ ID NO: 5693 - DNA, 21 bp, Artificial Sequence
  n-mer motif encoding polynucleotide
caggtgcagcatgagagggtg

SEQ ID NO: 5694 - DNA, 21 bp, Artificial Sequence
  n-mer motif encoding polynucleotide
caaatattaaactactcagtc

SEQ ID NO: 5695 - DNA, 21 bp, Artificial Sequence
  n-mer motif encoding polynucleotide
agtacgattggtaattctact

SEQ ID NO: 5696 - DNA, 21 bp, Artificial Sequence
  n-mer motif encoding polynucleotide
cctatacaccacggttcatcc

SEQ ID NO: 5697 - DNA, 21 bp, Artificial Sequence
  n-mer motif encoding polynucleotide
attgctactaatgtgatttat

SEQ ID NO: 5698 - DNA, 21 bp, Artificial Sequence
  n-mer motif encoding polynucleotide
caaggcggtacaaacaacccc

SEQ ID NO: 5699 - DNA, 21 bp, Artificial Sequence
  n-mer motif encoding polynucleotide
acccgtggcaacgacatatca

SEQ ID NO: 5700 - DNA, 21 bp, Artificial Sequence
  n-mer motif encoding polynucleotide
caaacgctcatagtggggtcc

SEQ ID NO: 5701 - DNA, 21 bp, Artificial Sequence
  n-mer motif encoding polynucleotide
cggggtctgcctgatgttaat

SEQ ID NO: 5702 - DNA, 21 bp, Artificial Sequence
  n-mer motif encoding polynucleotide
cttaatgtgaatacgcttaat

SEQ ID NO: 5703 - DNA, 21 bp, Artificial Sequence
  n-mer motif encoding polynucleotide
gggacaaaaagctggcctgtc

SEQ ID NO: 5704 - DNA, 21 bp, Artificial Sequence
  n-mer motif encoding polynucleotide
acgcatcttgtgagtgattcg

SEQ ID NO: 5705 - DNA, 21 bp, Artificial Sequence
  n-mer motif encoding polynucleotide
tggacgggcgcacaaccttct

SEQ ID NO: 5706 - DNA, 21 bp, Artificial Sequence
  n-mer motif encoding polynucleotide
tctgcgatgcacacattagtc

SEQ ID NO: 5707 - DNA, 21 bp, Artificial Sequence
  n-mer motif encoding polynucleotide
tcccaacaccacacgccactg

SEQ ID NO: 5708 - DNA, 21 bp, Artificial Sequence
  n-mer motif encoding polynucleotide
gataatcggatggaggctacg

SEQ ID NO: 5709 - DNA, 21 bp, Artificial Sequence
  n-mer motif encoding polynucleotide
ttgggaggaaccctgggaata

SEQ ID NO: 5710 - DNA, 21 bp, Artificial Sequence
  n-mer motif encoding polynucleotide
tttcataatgagtcttatggg

SEQ ID NO: 5711 - DNA, 21 bp, Artificial Sequence
  n-mer motif encoding polynucleotide
attcggacttctgtgattaat

SEQ ID NO: 5712 - DNA, 21 bp, Artificial Sequence
  n-mer motif encoding polynucleotide
tataatactgttgatcagcgg

SEQ ID NO: 5713 - DNA, 21 bp, Artificial Sequence
  n-mer motif encoding polynucleotide
gcgcaccaaaccgccgggcca

SEQ ID NO: 5714 - DNA, 21 bp, Artificial Sequence
  n-mer motif encoding polynucleotide
cctccggaaagtgccaggggc

SEQ ID NO: 5715 - DNA, 21 bp, Artificial Sequence
  n-mer motif encoding polynucleotide
aataatactttgaatattttg

SEQ ID NO: 5716 - DNA, 21 bp, Artificial Sequence
  n-mer motif encoding polynucleotide
gctagttatagtagtatggtg

SEQ ID NO: 5717 - DNA, 21 bp, Artificial Sequence
  n-mer motif encoding polynucleotide
tcgggtcaaaacggtacatca

SEQ ID NO: 5718 - DNA, 21 bp, Artificial Sequence
  n-mer motif encoding polynucleotide
ttgtctagtatgagtacggat

SEQ ID NO: 5719 - DNA, 21 bp, Artificial Sequence
  n-mer motif encoding polynucleotide
gtcgcctcgatggtacacaac

SEQ ID NO: 5720 - DNA, 21 bp, Artificial Sequence
  n-mer motif encoding polynucleotide
acgcaattgtcagacggctgc

SEQ ID NO: 5721 - DNA, 21 bp, Artificial Sequence
  n-mer motif encoding polynucleotide
gcgattgtggatagggggagt

SEQ ID NO: 5722 - DNA, 21 bp, Artificial Sequence
  n-mer motif encoding polynucleotide
aaccgtcaaagggacttcgaa

SEQ ID NO: 5723 - DNA, 21 bp, Artificial Sequence
  n-mer motif encoding polynucleotide
gcacaccaaaaagacatacgc

SEQ ID NO: 5724 - DNA, 21 bp, Artificial Sequence
  n-mer motif encoding polynucleotide
ttcaccgaacgcgcactccaa

SEQ ID NO: 5725 - DNA, 21 bp, Artificial Sequence
  n-mer motif encoding polynucleotide
atgctgtctcatggtgcgctt

SEQ ID NO: 5726 - DNA, 21 bp, Artificial Sequence
  n-mer motif encoding polynucleotide
tccgtaaccaacggagcggaa

SEQ ID NO: 5727 - DNA, 21 bp, Artificial Sequence
  n-mer motif encoding polynucleotide
atcaccgccgcgtcaccgcaa

SEQ ID NO: 5728 - DNA, 21 bp, Artificial Sequence
  n-mer motif encoding polynucleotide
caaaacacgcaacgatacttg

SEQ ID NO: 5729 - DNA, 21 bp, Artificial Sequence
  n-mer motif encoding polynucleotide
actggccaaggattctcggca

SEQ ID NO: 5730 - DNA, 21 bp, Artificial Sequence
  n-mer motif encoding polynucleotide
agttttgagaagaatggtatt

SEQ ID NO: 5731 - DNA, 21 bp, Artificial Sequence
  n-mer motif encoding polynucleotide
ctcacgtcccactctgcgggc

SEQ ID NO: 5732 - DNA, 21 bp, Artificial Sequence
  n-mer motif encoding polynucleotide
tctacaatcggcaacagcacg

SEQ ID NO: 5733 - DNA, 21 bp, Artificial Sequence
  n-mer motif encoding polynucleotide
ggtcttagtcggaatgatggt

SEQ ID NO: 5734 - DNA, 21 bp, Artificial Sequence
  n-mer motif encoding polynucleotide
tcgacgacgcacccttccgaa

SEQ ID NO: 5735 - DNA, 21 bp, Artificial Sequence
  n-mer motif encoding polynucleotide
ccaagtacgaacgaaagccgc

SEQ ID NO: 5736 - DNA, 21 bp, Artificial Sequence
  n-mer motif encoding polynucleotide
ggtacgaaggatattctgatt

SEQ ID NO: 5737 - DNA, 21 bp, Artificial Sequence
  n-mer motif encoding polynucleotide
tctactattaatatgcgtgcg

SEQ ID NO: 5738 - DNA, 21 bp, Artificial Sequence
  n-mer motif encoding polynucleotide
tatattgctgggggggagcag

SEQ ID NO: 5739 - DNA, 21 bp, Artificial Sequence
  n-mer motif encoding polynucleotide
tccagcggccaaccgctcgtc

SEQ ID NO: 5740 - DNA, 21 bp, Artificial Sequence
  n-mer motif encoding polynucleotide
gacaaacaacaaaccggacaa

SEQ ID NO: 5741 - DNA, 21 bp, Artificial Sequence
  n-mer motif encoding polynucleotide
gggctaggacaaccccaactc

SEQ ID NO: 5742 - DNA, 21 bp, Artificial Sequence
  n-mer motif encoding polynucleotide
agtccgcagcatggtgttatt

SEQ ID NO: 5743 - DNA, 21 bp, Artificial Sequence
  n-mer motif encoding polynucleotide
tataggggtagggaggattgg

SEQ ID NO: 5744 - DNA, 21 bp, Artificial Sequence
  n-mer motif encoding polynucleotide
gcggggggtttgctgtcgcgg

SEQ ID NO: 5745 - DNA, 21 bp, Artificial Sequence
  n-mer motif encoding polynucleotide
ccgatacaacaagcctcattg

SEQ ID NO: 5746 - DNA, 21 bp, Artificial Sequence
  n-mer motif encoding polynucleotide
tggagcgccggcgaacgggtg

SEQ ID NO: 5747 - DNA, 21 bp, Artificial Sequence
  n-mer motif encoding polynucleotide
aggggtgatgttgctacgacg

SEQ ID NO: 5748 - DNA, 21 bp, Artificial Sequence
  n-mer motif encoding polynucleotide
ttaacgggacaaaacgaattc

SEQ ID NO: 5749 - DNA, 21 bp, Artificial Sequence
  n-mer motif encoding polynucleotide
acgacgccgcctttttctaat

SEQ ID NO: 5750 - DNA, 21 bp, Artificial Sequence
  n-mer motif encoding polynucleotide
acgagtattggtagtgctaag

SEQ ID NO: 5751 - DNA, 21 bp, Artificial Sequence
  n-mer motif encoding polynucleotide
aatgtgcagaatgtgcctggg

SEQ ID NO: 5752 - DNA, 21 bp, Artificial Sequence
  n-mer motif encoding polynucleotide
tatacgggtactcttgttgtt

SEQ ID NO: 5753 - DNA, 21 bp, Artificial Sequence
  n-mer motif encoding polynucleotide
ggaacccacgcctcagcatac

SEQ ID NO: 5754 - DNA, 21 bp, Artificial Sequence
  n-mer motif encoding polynucleotide
ctggttgtttcgaatagtctg

SEQ ID NO: 5755 - DNA, 21 bp, Artificial Sequence
  n-mer motif encoding polynucleotide
acgcatcttgtgagggattcg

SEQ ID NO: 5756 - DNA, 21 bp, Artificial Sequence
  n-mer motif encoding polynucleotide
aatcatggtcgtgctattgat

SEQ ID NO: 5757 - DNA, 21 bp, Artificial Sequence
  n-mer motif encoding polynucleotide
cccaaaactctaacttcgaca

SEQ ID NO: 5758 - DNA, 21 bp, Artificial Sequence
  n-mer motif encoding polynucleotide
ttcggtatagggcacggaaca

SEQ ID NO: 5759 - DNA, 21 bp, Artificial Sequence
  n-mer motif encoding polynucleotide
gcgcttccgtctcgtgagcgg

SEQ ID NO: 5760 - DNA, 21 bp, Artificial Sequence
  n-mer motif encoding polynucleotide
gcgactaggggtgagtcgtct

SEQ ID NO: 5761 - DNA, 21 bp, Artificial Sequence
  n-mer motif encoding polynucleotide
gggacaaccgaagttaacaaa

SEQ ID NO: 5762 - DNA, 21 bp, Artificial Sequence
  n-mer motif encoding polynucleotide
acccacacccttgggggaaca

SEQ ID NO: 5763 - DNA, 21 bp, Artificial Sequence
  n-mer motif encoding polynucleotide
gaagcagtaacaagtaaatgg

SEQ ID NO: 5764 - DNA, 21 bp, Artificial Sequence
  n-mer motif encoding polynucleotide
cactacggtaacaaagacata

SEQ ID NO: 5765 - DNA, 21 bp, Artificial Sequence
  n-mer motif encoding polynucleotide
atttctacgcatacgatgacg

SEQ ID NO: 5766 - DNA, 21 bp, Artificial Sequence
  n-mer motif encoding polynucleotide
gatacgtataatagtaatact

SEQ ID NO: 5767 - DNA, 21 bp, Artificial Sequence
  n-mer motif encoding polynucleotide
gtttttactgggcagacggag

SEQ ID NO: 5768 - DNA, 21 bp, Artificial Sequence
  n-mer motif encoding polynucleotide
tcggtcaccagtggaacacaa

SEQ ID NO: 5769 - DNA, 21 bp, Artificial Sequence
  n-mer motif encoding polynucleotide
catacgtattcgcaggctgat

SEQ ID NO: 5770 - DNA, 21 bp, Artificial Sequence
  n-mer motif encoding polynucleotide
gtagcgggcttagtcgacata

SEQ ID NO: 5771 - DNA, 21 bp, Artificial Sequence
  n-mer motif encoding polynucleotide
gactctaccaaagccatgcaa

SEQ ID NO: 5772 - DNA, 21 bp, Artificial Sequence
  n-mer motif encoding polynucleotide
gaggggcataatcgtggtatt

SEQ ID NO: 5773 - DNA, 21 bp, Artificial Sequence
  n-mer motif encoding polynucleotide
gggttgcatgggacgagtaat

SEQ ID NO: 5774 - DNA, 21 bp, Artificial Sequence
  n-mer motif encoding polynucleotide
ccgctttctcttcataatagt

SEQ ID NO: 5775 - DNA, 21 bp, Artificial Sequence
  n-mer motif encoding polynucleotide
gcgagtgataagggggcgaat

SEQ ID NO: 5776 - DNA, 21 bp, Artificial Sequence
  n-mer motif encoding polynucleotide
gtgctgttgcagaattctcat

SEQ ID NO: 5777 - DNA, 21 bp, Artificial Sequence
  n-mer motif encoding polynucleotide
ctatacgacggaaaacacgtc

SEQ ID NO: 5778 - DNA, 21 bp, Artificial Sequence
  n-mer motif encoding polynucleotide
acccaaggatctaacaccaca

SEQ ID NO: 5779 - DNA, 21 bp, Artificial Sequence
  n-mer motif encoding polynucleotide
ttcctcgacaaatacaactac

SEQ ID NO: 5780 - DNA, 21 bp, Artificial Sequence
  n-mer motif encoding polynucleotide
gacaccggaatcaaaaacgtt

SEQ ID NO: 5781 - DNA, 21 bp, Artificial Sequence
  n-mer motif encoding polynucleotide
tccggagcggcacaaaaccca

SEQ ID NO: 5782 - DNA, 21 bp, Artificial Sequence
  n-mer motif encoding polynucleotide
accctccacaccaaagaccta

SEQ ID NO: 5783 - DNA, 21 bp, Artificial Sequence
  n-mer motif encoding polynucleotide
gctacttacgttgtcggaaca

SEQ ID NO: 5784 - DNA, 21 bp, Artificial Sequence
  n-mer motif encoding polynucleotide
cttgtggggactttggtgtat

SEQ ID NO: 5785 - DNA, 21 bp, Artificial Sequence
  n-mer motif encoding polynucleotide
tctaatacgactgtgcagctt

SEQ ID NO: 5786 - DNA, 21 bp, Artificial Sequence
  n-mer motif encoding polynucleotide
aaggctcagattaatcagatg

SEQ ID NO: 5787 - DNA, 21 bp, Artificial Sequence
  n-mer motif encoding polynucleotide
cggaatgctactgtgactgtt

SEQ ID NO: 5788 - DNA, 21 bp, Artificial Sequence
  n-mer motif encoding polynucleotide
gcaaccagagtgggcaaccac

SEQ ID NO: 5789 - DNA, 21 bp, Artificial Sequence
  n-mer motif encoding polynucleotide
agttatcagaatcctccgcct

SEQ ID NO: 5790 - DNA, 21 bp, Artificial Sequence
  n-mer motif encoding polynucleotide
tttgatagttataatattgtg

SEQ ID NO: 5791 - DNA, 21 bp, Artificial Sequence
  n-mer motif encoding polynucleotide
gctactctttctccgcatgct

SEQ ID NO: 5792 - DNA, 21 bp, Artificial Sequence
  n-mer motif encoding polynucleotide
tgggagagtccgactaatgcg

SEQ ID NO: 5793 - DNA, 21 bp, Artificial Sequence
  n-mer motif encoding polynucleotide
atcgaaaacgtaaaccacttg

SEQ ID NO: 5794 - DNA, 21 bp, Artificial Sequence
  n-mer motif encoding polynucleotide
tatcgggcttcggatgtggcg

SEQ ID NO: 5795 - DNA, 21 bp, Artificial Sequence
  n-mer motif encoding polynucleotide
catatgtcttctgttgcgact

SEQ ID NO: 5796 - DNA, 21 bp, Artificial Sequence
  n-mer motif encoding polynucleotide
atccaaagagacgtgggccac

SEQ ID NO: 5797 - DNA, 21 bp, Artificial Sequence
  n-mer motif encoding polynucleotide
gagagtgttagggagactatt

SEQ ID NO: 5798 - DNA, 21 bp, Artificial Sequence
  n-mer motif encoding polynucleotide
cagggggggaatagtcggttt

SEQ ID NO: 5799 - DNA, 21 bp, Artificial Sequence
  n-mer motif encoding polynucleotide
gaaaaaggcacaccaagtagc

SEQ ID NO: 5800 - DNA, 21 bp, Artificial Sequence
  n-mer motif encoding polynucleotide
cacgacagcacaacccgccca

SEQ ID NO: 5801 - DNA, 21 bp, Artificial Sequence
  n-mer motif encoding polynucleotide
ttaccaacaggcgtcctgccc

SEQ ID NO: 5802 - DNA, 21 bp, Artificial Sequence
  n-mer motif encoding polynucleotide
accctaggctacccagacaaa

SEQ ID NO: 5803 - DNA, 21 bp, Artificial Sequence
  n-mer motif encoding polynucleotide
gctaacaccgtcacagaacga

SEQ ID NO: 5804 - DNA, 21 bp, Artificial Sequence
  n-mer motif encoding polynucleotide
cacgacaaatctatccaacca

SEQ ID NO: 5805 - DNA, 21 bp, Artificial Sequence
  n-mer motif encoding polynucleotide
ggaggaacagcccttgggagc

SEQ ID NO: 5806 - DNA, 21 bp, Artificial Sequence
  n-mer motif encoding polynucleotide
gggggtaactaccacaccact

SEQ ID NO: 5807 - DNA, 21 bp, Artificial Sequence
  n-mer motif encoding polynucleotide
atctcagaaatgactaggtac

SEQ ID NO: 5808 - DNA, 21 bp, Artificial Sequence
  n-mer motif encoding polynucleotide
gttgaatctaaatccgaacca

SEQ ID NO: 5809 - DNA, 21 bp, Artificial Sequence
  n-mer motif encoding polynucleotide
gaccgtgcccaaaacaacgaa

SEQ ID NO: 5810 - DNA, 21 bp, Artificial Sequence
  n-mer motif encoding polynucleotide
acggcgcagaccggctgggtt

SEQ ID NO: 5811 - DNA, 21 bp, Artificial Sequence
  n-mer motif encoding polynucleotide
gggttcgggcacctgcccgaa

SEQ ID NO: 5812 - DNA, 21 bp, Artificial Sequence
  n-mer motif encoding polynucleotide
cctattacgggttttagtgtt

SEQ ID NO: 5813 - DNA, 21 bp, Artificial Sequence
  n-mer motif encoding polynucleotide
gataggacgtattcgaatacg

SEQ ID NO: 5814 - DNA, 21 bp, Artificial Sequence
  n-mer motif encoding polynucleotide
atgtcaaacgcctcctacata

SEQ ID NO: 5815 - DNA, 21 bp, Artificial Sequence
  n-mer motif encoding polynucleotide
gataatagtaggcctgaggtg

SEQ ID NO: 5816 - DNA, 21 bp, Artificial Sequence
  n-mer motif encoding polynucleotide
tcaagttcccaaacggttttg

SEQ ID NO: 5817 - DNA, 21 bp, Artificial Sequence
  n-mer motif encoding polynucleotide
agtaatcttgatggtactatt

SEQ ID NO: 5818 - DNA, 21 bp, Artificial Sequence
  n-mer motif encoding polynucleotide
agtaatatgcgtgaggagatt

SEQ ID NO: 5819 - DNA, 21 bp, Artificial Sequence
  n-mer motif encoding polynucleotide
agacttacagaactggtcata

SEQ ID NO: 5820 - DNA, 21 bp, Artificial Sequence
  n-mer motif encoding polynucleotide
caggttagtctggtgaagttg

SEQ ID NO: 5821 - DNA, 21 bp, Artificial Sequence
  n-mer motif encoding polynucleotide
gaaatacacacgaccacaggc

SEQ ID NO: 5822 - DNA, 21 bp, Artificial Sequence
  n-mer motif encoding polynucleotide
agcaggatagaaaacaacaac

SEQ ID NO: 5823 - DNA, 21 bp, Artificial Sequence
  n-mer motif encoding polynucleotide
ggaacaggcaaagaagttcga

SEQ ID NO: 5824 - DNA, 21 bp, Artificial Sequence
  n-mer motif encoding polynucleotide
tggcaggatcataataaggtg

SEQ ID NO: 5825 - DNA, 21 bp, Artificial Sequence
  n-mer motif encoding polynucleotide
tcgacaaactctataggcgcc

SEQ ID NO: 5826 - DNA, 21 bp, Artificial Sequence
  n-mer motif encoding polynucleotide
tccgaattaatggtcagaccc

SEQ ID NO: 5827 - DNA, 21 bp, Artificial Sequence
  n-mer motif encoding polynucleotide
ccgcttcagaataataagacg

SEQ ID NO: 5828 - DNA, 21 bp, Artificial Sequence
  n-mer motif encoding polynucleotide
ccttatgcgaataggcttgag

SEQ ID NO: 5829 - DNA, 21 bp, Artificial Sequence
  n-mer motif encoding polynucleotide
gggacggtttcgcttattcct

SEQ ID NO: 5830 - DNA, 21 bp, Artificial Sequence
  n-mer motif encoding polynucleotide
gatgtttatcttaagagtccg

SEQ ID NO: 5831 - DNA, 21 bp, Artificial Sequence
  n-mer motif encoding polynucleotide
ttgccggataaggggcggatt

SEQ ID NO: 5832 - DNA, 21 bp, Artificial Sequence
  n-mer motif encoding polynucleotide
tcgataacgaccgtagcgaac

SEQ ID NO: 5833 - DNA, 21 bp, Artificial Sequence
  n-mer motif encoding polynucleotide
ccgcttcaatcccaatcggga

SEQ ID NO: 5834 - DNA, 21 bp, Artificial Sequence
  n-mer motif encoding polynucleotide
aataatatgggtcatggtcat

SEQ ID NO: 5835 - DNA, 21 bp, Artificial Sequence
  n-mer motif encoding polynucleotide
agcggacaaaaaaactcagaa

SEQ ID NO: 5836 - DNA, 21 bp, Artificial Sequence
  n-mer motif encoding polynucleotide
accgaagcgggccgcccccaa

SEQ ID NO: 5837 - DNA, 21 bp, Artificial Sequence
  n-mer motif encoding polynucleotide
accttacacacgaaagacttg

SEQ ID NO: 5838 - DNA, 21 bp, Artificial Sequence
  n-mer motif encoding polynucleotide
cttcgagacctaaacggagga

SEQ ID NO: 5839 - DNA, 21 bp, Artificial Sequence
  n-mer motif encoding polynucleotide
gtttgtgttactacttgtgct

SEQ ID NO: 5840 - DNA, 21 bp, Artificial Sequence
  n-mer motif encoding polynucleotide
gtcacagctgctcaaccccaa

SEQ ID NO: 5841 - DNA, 21 bp, Artificial Sequence
  n-mer motif encoding polynucleotide
gcgacttttagtcatgctggt

SEQ ID NO: 5842 - DNA, 21 bp, Artificial Sequence
  n-mer motif encoding polynucleotide
acttatgcgcctaggtcgcct

SEQ ID NO: 5843 - DNA, 21 bp, Artificial Sequence
  n-mer motif encoding polynucleotide
acgtcggagatgcgtactgct

SEQ ID NO: 5844 - DNA, 21 bp, Artificial Sequence
  n-mer motif encoding polynucleotide
tactcgacaaccatgcttaac

SEQ ID NO: 5845 - DNA, 21 bp, Artificial Sequence
  n-mer motif encoding polynucleotide
tctttcacgaacacaaaccca

SEQ ID NO: 5846 - DNA, 21 bp, Artificial Sequence
  n-mer motif encoding polynucleotide
agtcctcctagtacgtcgggt

SEQ ID NO: 5847 - DNA, 21 bp, Artificial Sequence
  n-mer motif encoding polynucleotide
gtgacgactgttgatagtgct

SEQ ID NO: 5848 - DNA, 21 bp, Artificial Sequence
  n-mer motif encoding polynucleotide
gaggcgcataatcgtgttatt

SEQ ID NO: 5849 - DNA, 21 bp, Artificial Sequence
  n-mer motif encoding polynucleotide
atggagttgacttctactagt

SEQ ID NO: 5850 - DNA, 21 bp, Artificial Sequence
  n-mer motif encoding polynucleotide
catttggttactagtggtatt

SEQ ID NO: 5851 - DNA, 21 bp, Artificial Sequence
  n-mer motif encoding polynucleotide
caaaccatcacctcacaaatg

SEQ ID NO: 5852 - DNA, 21 bp, Artificial Sequence
  n-mer motif encoding polynucleotide
actgcgaatagtacgtatgtg

SEQ ID NO: 5853 - DNA, 21 bp, Artificial Sequence
  n-mer motif encoding polynucleotide
cttatccaattatcgggtcaa

SEQ ID NO: 5854 - DNA, 21 bp, Artificial Sequence
  n-mer motif encoding polynucleotide
tcttacgttagcgtccccgcc

SEQ ID NO: 5855 - DNA, 21 bp, Artificial Sequence
  n-mer motif encoding polynucleotide
gtgcatgggaatgctccggct

SEQ ID NO: 5856 - DNA, 21 bp, Artificial Sequence
  n-mer motif encoding polynucleotide
gccggaaaaacccacgccgac

SEQ ID NO: 5857 - DNA, 21 bp, Artificial Sequence
  n-mer motif encoding polynucleotide
acattccaccaaggggtcaaa

SEQ ID NO: 5858 - DNA, 21 bp, Artificial Sequence
  n-mer motif encoding polynucleotide
ttaggaaacaaccggccacta

SEQ ID NO: 5859 - DNA, 21 bp, Artificial Sequence
  n-mer motif encoding polynucleotide
ctgcacctcgtccggagcttc

SEQ ID NO: 5860 - DNA, 21 bp, Artificial Sequence
  n-mer motif encoding polynucleotide
tcctacagtacttcaacaccg

SEQ ID NO: 5861 - DNA, 21 bp, Artificial Sequence
  n-mer motif encoding polynucleotide
atatcgcaaggctcgagcctc

SEQ ID NO: 5862 - DNA, 21 bp, Artificial Sequence
  n-mer motif encoding polynucleotide
ctccaactggctacatcccac

SEQ ID NO: 5863 - DNA, 21 bp, Artificial Sequence
  n-mer motif encoding polynucleotide
gtgactcagcggtttgctgag

SEQ ID NO: 5864 - DNA, 21 bp, Artificial Sequence
  n-mer motif encoding polynucleotide
gctatagactccatcaaaatg

SEQ ID NO: 5865 - DNA, 21 bp, Artificial Sequence
  n-mer motif encoding polynucleotide
gacgcacacactttcagccgg

SEQ ID NO: 5866 - DNA, 21 bp, Artificial Sequence
  n-mer motif encoding polynucleotide
cgtggttcagacggaggattg

SEQ ID NO: 5867 - DNA, 21 bp, Artificial Sequence
  n-mer motif encoding polynucleotide
ttagcacaaggcacggaccgg

SEQ ID NO: 5868 - DNA, 21 bp, Artificial Sequence
  n-mer motif encoding polynucleotide
aaaaacaacaactcagacagt

SEQ ID NO: 5869 - DNA, 21 bp, Artificial Sequence
  n-mer motif encoding polynucleotide
gaaaacgaaaaacgagaaagc

SEQ ID NO: 5870 - DNA, 21 bp, Artificial Sequence
  n-mer motif encoding polynucleotide
aacgaacaattcgaaaaagtc

SEQ ID NO: 5871 - DNA, 21 bp, Artificial Sequence
  n-mer motif encoding polynucleotide
acacaagtagtcgcaagaaca

SEQ ID NO: 5872 - DNA, 21 bp, Artificial Sequence
  n-mer motif encoding polynucleotide
ggagtaaacgtcaccaacagc

SEQ ID NO: 5873 - DNA, 21 bp, Artificial Sequence
  n-mer motif encoding polynucleotide
gccgacaaaggattcggccac

SEQ ID NO: 5874 - DNA, 21 bp, Artificial Sequence
  n-mer motif encoding polynucleotide
actcataagcaggtggatctt

SEQ ID NO: 5875 - DNA, 21 bp, Artificial Sequence
  n-mer motif encoding polynucleotide
tcggctaacttatacaaacaa

SEQ ID NO: 5876 - DNA, 21 bp, Artificial Sequence
  n-mer motif encoding polynucleotide
aagctgcatactaaggatctt

SEQ ID NO: 5877 - DNA, 21 bp, Artificial Sequence
  n-mer motif encoding polynucleotide
gtggtggttcacactatccca

SEQ ID NO: 5878 - DNA, 21 bp, Artificial Sequence
  n-mer motif encoding polynucleotide
tctacgtctcaggctgtgcag

SEQ ID NO: 5879 - DNA, 21 bp, Artificial Sequence
  n-mer motif encoding polynucleotide
cgtaacggctccgcccaaagc

SEQ ID NO: 5880 - DNA, 21 bp, Artificial Sequence
  n-mer motif encoding polynucleotide
cattatgggaataaggatatt

SEQ ID NO: 5881 - DNA, 21 bp, Artificial Sequence
  n-mer motif encoding polynucleotide
agcttcttggtagcccaccca

SEQ ID NO: 5882 - DNA, 21 bp, Artificial Sequence
  n-mer motif encoding polynucleotide
cagcagaatacgagtttgccg

SEQ ID NO: 5883 - DNA, 21 bp, Artificial Sequence
  n-mer motif encoding polynucleotide
atgcacgtcgacaaaacgagt

SEQ ID NO: 5884 - DNA, 21 bp, Artificial Sequence
  n-mer motif encoding polynucleotide
aataatgagaatacgcgtaat

SEQ ID NO: 5885 - DNA, 21 bp, Artificial Sequence
  n-mer motif encoding polynucleotide
tcgataaacaacataggcgca

SEQ ID NO: 5886 - DNA, 21 bp, Artificial Sequence
  n-mer motif encoding polynucleotide
gctactatatcggaccgagcc

SEQ ID NO: 5887 - DNA, 21 bp, Artificial Sequence
  n-mer motif encoding polynucleotide
tactcaaacctcgtactttcc

SEQ ID NO: 5888 - DNA, 21 bp, Artificial Sequence
  n-mer motif encoding polynucleotide
atgatgaatgtgagtggtcat

SEQ ID NO: 5889 - DNA, 21 bp, Artificial Sequence
  n-mer motif encoding polynucleotide
ggggagacgcggtcgactgct

SEQ ID NO: 5890 - DNA, 21 bp, Artificial Sequence
  n-mer motif encoding polynucleotide
acgaagggttataatgatctt

SEQ ID NO: 5891 - DNA, 21 bp, Artificial Sequence
  n-mer motif encoding polynucleotide
gcgtataatatgtcgtctgtt

SEQ ID NO: 5892 - DNA, 21 bp, Artificial Sequence
  n-mer motif encoding polynucleotide
gcagaccccgctaaaggcaaa

SEQ ID NO: 5893 - DNA, 21 bp, Artificial Sequence
  n-mer motif encoding polynucleotide
tatatttcggcgcctccgatg

SEQ ID NO: 5894 - DNA, 21 bp, Artificial Sequence
  n-mer motif encoding polynucleotide
cgaaacaacccatcgcacgac

SEQ ID NO: 5895 - DNA, 21 bp, Artificial Sequence
  n-mer motif encoding polynucleotide
ggaacctccatagactacgta

SEQ ID NO: 5896 - DNA, 21 bp, Artificial Sequence
  n-mer motif encoding polynucleotide
ggcaccgggtacccaaaccaa

SEQ ID NO: 5897 - DNA, 21 bp, Artificial Sequence
  n-mer motif encoding polynucleotide
gatcatatgaatttgaggtct

SEQ ID NO: 5898 - DNA, 21 bp, Artificial Sequence
  n-mer motif encoding polynucleotide
attaattcgtatttgcatgag

SEQ ID NO: 5899 - DNA, 21 bp, Artificial Sequence
  n-mer motif encoding polynucleotide
tggcaaatgggggccgggagc

SEQ ID NO: 5900 - DNA, 21 bp, Artificial Sequence
  n-mer motif encoding polynucleotide
atgggtatcgggtcatacaaa

SEQ ID NO: 5901 - DNA, 21 bp, Artificial Sequence
  n-mer motif encoding polynucleotide
caaaaccacaacgaactaaaa

SEQ ID NO: 5902 - DNA, 21 bp, Artificial Sequence
  n-mer motif encoding polynucleotide
gataagtctaattatagtatt

SEQ ID NO: 5903 - DNA, 21 bp, Artificial Sequence
  n-mer motif encoding polynucleotide
acaacgaaaccggtcgcggaa

SEQ ID NO: 5904 - DNA, 21 bp, Artificial Sequence
  n-mer motif encoding polynucleotide
gtgactgtgagtaatagtctg

SEQ ID NO: 5905 - DNA, 21 bp, Artificial Sequence
  n-mer motif encoding polynucleotide
acggcgtatctggatggtctg

SEQ ID NO: 5906 - DNA, 21 bp, Artificial Sequence
  n-mer motif encoding polynucleotide
aatttgcagactggtgttcag

SEQ ID NO: 5907 - DNA, 21 bp, Artificial Sequence
  n-mer motif encoding polynucleotide
accgtcgctccctacagtagc

SEQ ID NO: 5908 - DNA, 21 bp, Artificial Sequence
  n-mer motif encoding polynucleotide
gttcagatttctatgaataat

SEQ ID NO: 5909 - DNA, 21 bp, Artificial Sequence
  n-mer motif encoding polynucleotide
tacatagcaggtggtgaacaa

SEQ ID NO: 5910 - DNA, 21 bp, Artificial Sequence
  n-mer motif encoding polynucleotide
ttcatggaagtcatgaaaaac

SEQ ID NO: 5911 - DNA, 21 bp, Artificial Sequence
  n-mer motif encoding polynucleotide
acgactgataagggtattaat

SEQ ID NO: 5912 - DNA, 21 bp, Artificial Sequence
  n-mer motif encoding polynucleotide
ttgagctacagcatccaacac

SEQ ID NO: 5913 - DNA, 21 bp, Artificial Sequence
  n-mer motif encoding polynucleotide
gcttataatgctcgtctgcct

SEQ ID NO: 5914 - DNA, 21 bp, Artificial Sequence
  n-mer motif encoding polynucleotide
aacaccggcaccacgagtgtc

SEQ ID NO: 5915 - DNA, 21 bp, Artificial Sequence
  n-mer motif encoding polynucleotide
gtgctgagtacggggctgcgg

SEQ ID NO: 5916 - DNA, 21 bp, Artificial Sequence
  n-mer motif encoding polynucleotide
aacgactcctcgtcaatgtcc

SEQ ID NO: 5917 - DNA, 21 bp, Artificial Sequence
  n-mer motif encoding polynucleotide
cgccaaggcagcttgatgata

SEQ ID NO: 5918 - DNA, 21 bp, Artificial Sequence
  n-mer motif encoding polynucleotide
atcagcaccgcatacatgttg

SEQ ID NO: 5919 - DNA, 21 bp, Artificial Sequence
  n-mer motif encoding polynucleotide
ggtactatgaatattggtatt

SEQ ID NO: 5920 - DNA, 21 bp, Artificial Sequence
  n-mer motif encoding polynucleotide
cataataataatttgctgaat

SEQ ID NO: 5921 - DNA, 21 bp, Artificial Sequence
  n-mer motif encoding polynucleotide
catttttcgcagattactaat

SEQ ID NO: 5922 - DNA, 21 bp, Artificial Sequence
  n-mer motif encoding polynucleotide
gacctgaccagagctgcaata

SEQ ID NO: 5923 - DNA, 21 bp, Artificial Sequence
  n-mer motif encoding polynucleotide
gtcgctatgggaggcggtccc

SEQ ID NO: 5924 - DNA, 21 bp, Artificial Sequence
  n-mer motif encoding polynucleotide
gcctacggtatcagagaagtg

SEQ ID NO: 5925 - DNA, 21 bp, Artificial Sequence
  n-mer motif encoding polynucleotide
acatcagacggtctactaagt

SEQ ID NO: 5926 - DNA, 21 bp, Artificial Sequence
  n-mer motif encoding polynucleotide
acgatggctacaaacttaagt

SEQ ID NO: 5927 - DNA, 21 bp, Artificial Sequence
  n-mer motif encoding polynucleotide
aacaacggcaactcatcaagg

SEQ ID NO: 5928 - DNA, 21 bp, Artificial Sequence
  n-mer motif encoding polynucleotide
acggagaaggcgagtcctctg

SEQ ID NO: 5929 - DNA, 21 bp, Artificial Sequence
  n-mer motif encoding polynucleotide
ctcaaccacacaatgcccctc

SEQ ID NO: 5930 - DNA, 21 bp, Artificial Sequence
  n-mer motif encoding polynucleotide
gatacggcgagttataataat

SEQ ID NO: 5931 - DNA, 21 bp, Artificial Sequence
  n-mer motif encoding polynucleotide
aacatgaccaacgaacggctc

SEQ ID NO: 5932 - DNA, 21 bp, Artificial Sequence
  n-mer motif encoding polynucleotide
gtagtctcatcgggcggctgg

SEQ ID NO: 5933 - DNA, 21 bp, Artificial Sequence
  n-mer motif encoding polynucleotide
gtgaatcagagtcctggggct

SEQ ID NO: 5934 - DNA, 21 bp, Artificial Sequence
  n-mer motif encoding polynucleotide
gatcatcatcctcagagtcgt

SEQ ID NO: 5935 - DNA, 21 bp, Artificial Sequence
  n-mer motif encoding polynucleotide
cgatggcaaggactgagcgcg

SEQ ID NO: 5936 - DNA, 21 bp, Artificial Sequence
  n-mer motif encoding polynucleotide
gcggttacgacaagcgtgagg

SEQ ID NO: 5937 - DNA, 21 bp, Artificial Sequence
  n-mer motif encoding polynucleotide
tggggagtcagtaactcagca

SEQ ID NO: 5938 - DNA, 21 bp, Artificial Sequence
  n-mer motif encoding polynucleotide
gcgcatatgcattcggagttg

SEQ ID NO: 5939 - DNA, 21 bp, Artificial Sequence
  n-mer motif encoding polynucleotide
aataatcttacgaattcgacg

SEQ ID NO: 5940 - DNA, 21 bp, Artificial Sequence
  n-mer motif encoding polynucleotide
agtagtgggggtatgaaggcg

SEQ ID NO: 5941 - DNA, 21 bp, Artificial Sequence
  n-mer motif encoding polynucleotide
gttgggtatggggagcatgtt

SEQ ID NO: 5942 - DNA, 21 bp, Artificial Sequence
  n-mer motif encoding polynucleotide
accatagtgtccacttcttac

SEQ ID NO: 5943 - DNA, 21 bp, Artificial Sequence
  n-mer motif encoding polynucleotide
cccaccagtcaccaagaaccc

SEQ ID NO: 5944 - DNA, 21 bp, Artificial Sequence
  n-mer motif encoding polynucleotide
tctaaccttcgaaacacaata

SEQ ID NO: 5945 - DNA, 21 bp, Artificial Sequence
  n-mer motif encoding polynucleotide
tcaagacacgacgtccgaaac

SEQ ID NO: 5946 - DNA, 21 bp, Artificial Sequence
  n-mer motif encoding polynucleotide
cagatgaatattcatgataag

SEQ ID NO: 5947 - DNA, 21 bp, Artificial Sequence
  n-mer motif encoding polynucleotide
tgggctatgaataatgtgccg

SEQ ID NO: 5948 - DNA, 21 bp, Artificial Sequence
  n-mer motif encoding polynucleotide
gcgatggatgggtatagggtt

SEQ ID NO: 5949 - DNA, 21 bp, Artificial Sequence
  n-mer motif encoding polynucleotide
aaagggggaaacctcaccgca

SEQ ID NO: 5950 - DNA, 21 bp, Artificial Sequence
  n-mer motif encoding polynucleotide
attggtaaggatagtgttccg

SEQ ID NO: 5951 - DNA, 21 bp, Artificial Sequence
  n-mer motif encoding polynucleotide
gtgcagttgacgcataatggg

SEQ ID NO: 5952 - DNA, 21 bp, Artificial Sequence
  n-mer motif encoding polynucleotide
ggcctgaaccagatcacatcg

SEQ ID NO: 5953 - DNA, 21 bp, Artificial Sequence
  n-mer motif encoding polynucleotide
aggggtgatccttctacgcct

SEQ ID NO: 5954 - DNA, 21 bp, Artificial Sequence
  n-mer motif encoding polynucleotide
gttccctccgacccccactgg

SEQ ID NO: 5955 - DNA, 21 bp, Artificial Sequence
  n-mer motif encoding polynucleotide
acgttaagttcccaagtcaca

SEQ ID NO: 5956 - DNA, 21 bp, Artificial Sequence
  n-mer motif encoding polynucleotide
aaccaaagagttgaacaaaaa

SEQ ID NO: 5957 - DNA, 21 bp, Artificial Sequence
  n-mer motif encoding polynucleotide
gtacttccaagtcggatcgcg

SEQ ID NO: 5958 - DNA, 21 bp, Artificial Sequence
  n-mer motif encoding polynucleotide
gggcactacgctacaaacaca

SEQ ID NO: 5959 - DNA, 21 bp, Artificial Sequence
  n-mer motif encoding polynucleotide
ccttcgattccgtcgttttcg

SEQ ID NO: 5960 - DNA, 21 bp, Artificial Sequence
  n-mer motif encoding polynucleotide
acttatgagtatccgactcgg

SEQ ID NO: 5961 - DNA, 21 bp, Artificial Sequence
  n-mer motif encoding polynucleotide
aaagaccacatcctcagcctc

SEQ ID NO: 5962 - DNA, 21 bp, Artificial Sequence
  n-mer motif encoding polynucleotide
ggcacaggaggtaaccgagaa

SEQ ID NO: 5963 - DNA, 21 bp, Artificial Sequence
  n-mer motif encoding polynucleotide
aagggggatggtgcttatgag

SEQ ID NO: 5964 - DNA, 21 bp, Artificial Sequence
  n-mer motif encoding polynucleotide
tcttctttcggaaaagacaac

SEQ ID NO: 5965 - DNA, 21 bp, Artificial Sequence
  n-mer motif encoding polynucleotide
acagtatcgtcatacgtacaa

SEQ ID NO: 5966 - DNA, 21 bp, Artificial Sequence
  n-mer motif encoding polynucleotide
agggctcatggggataatcag

SEQ ID NO: 5967 - DNA, 21 bp, Artificial Sequence
  n-mer motif encoding polynucleotide
tatcatgctcatagtaatgag

SEQ ID NO: 5968 - DNA, 21 bp, Artificial Sequence
  n-mer motif encoding polynucleotide
gcaaacttgcccagcggtcac

SEQ ID NO: 5969 - DNA, 21 bp, Artificial Sequence
  n-mer motif encoding polynucleotide
gcgaacctcaacttgaccagt

SEQ ID NO: 5970 - DNA, 21 bp, Artificial Sequence
  n-mer motif encoding polynucleotide
aggcttaatgcgggtgagcat

SEQ ID NO: 5971 - DNA, 21 bp, Artificial Sequence
  n-mer motif encoding polynucleotide
tatgttgattatagtaagtcg

SEQ ID NO: 5972 - DNA, 21 bp, Artificial Sequence
  n-mer motif encoding polynucleotide
gctaattctgggttgcataat

SEQ ID NO: 5973 - DNA, 21 bp, Artificial Sequence
  n-mer motif encoding polynucleotide
acgagtggtgtgcttacgcgg

SEQ ID NO: 5974 - DNA, 21 bp, Artificial Sequence
  n-mer motif encoding polynucleotide
ggaaaaccagcacaagaattc

SEQ ID NO: 5975 - DNA, 21 bp, Artificial Sequence
  n-mer motif encoding polynucleotide
gtggggacgcatttgcattcg

SEQ ID NO: 5976 - DNA, 21 bp, Artificial Sequence
  n-mer motif encoding polynucleotide
ccgatgaacaaagacatactg

SEQ ID NO: 5977 - DNA, 21 bp, Artificial Sequence
  n-mer motif encoding polynucleotide
gacgcccaccactcaagcagc

SEQ ID NO: 5978 - DNA, 21 bp, Artificial Sequence
  n-mer motif encoding polynucleotide
actaacgccatctctcaaacg

SEQ ID NO: 5979 - DNA, 21 bp, Artificial Sequence
  n-mer motif encoding polynucleotide
gttttgtctgataaggcgtat

SEQ ID NO: 5980 - DNA, 21 bp, Artificial Sequence
  n-mer motif encoding polynucleotide
aacctacttgtcgaccaacgt

SEQ ID NO: 5981 - DNA, 21 bp, Artificial Sequence
  n-mer motif encoding polynucleotide
actggtcatccgccggcggcg

SEQ ID NO: 5982 - DNA, 21 bp, Artificial Sequence
  n-mer motif encoding polynucleotide
attagttcggggattttgtcg

SEQ ID NO: 5983 - DNA, 21 bp, Artificial Sequence
  n-mer motif encoding polynucleotide
aatacgaatttgttgggttat

SEQ ID NO: 5984 - DNA, 21 bp, Artificial Sequence
  n-mer motif encoding polynucleotide
acgctatcggttaccctgggt

SEQ ID NO: 5985 - DNA, 21 bp, Artificial Sequence
  n-mer motif encoding polynucleotide
catactggtgttcagactaat

SEQ ID NO: 5986 - DNA, 21 bp, Artificial Sequence
  n-mer motif encoding polynucleotide
gaggttagtaataataattat

SEQ ID NO: 5987 - DNA, 21 bp, Artificial Sequence
  n-mer motif encoding polynucleotide
ctggctaatatttcgctgtat

SEQ ID NO: 5988 - DNA, 21 bp, Artificial Sequence
  n-mer motif encoding polynucleotide
gtggagcatgttgctcatcag

SEQ ID NO: 5989 - DNA, 21 bp, Artificial Sequence
  n-mer motif encoding polynucleotide
gtcgacaaaagcgaagccgac

SEQ ID NO: 5990 - DNA, 21 bp, Artificial Sequence
  n-mer motif encoding polynucleotide
ggcttcgcattaactggcacc

SEQ ID NO: 5991 - DNA, 21 bp, Artificial Sequence
  n-mer motif encoding polynucleotide
ttgttgacggctccgcatagg

SEQ ID NO: 5992 - DNA, 21 bp, Artificial Sequence
  n-mer motif encoding polynucleotide
aatgcgggggctcttatgggt

SEQ ID NO: 5993 - DNA, 21 bp, Artificial Sequence
  n-mer motif encoding polynucleotide
aggacgcaagcaggggactca

SEQ ID NO: 5994 - DNA, 21 bp, Artificial Sequence
  n-mer motif encoding polynucleotide
aacacacacagacaagaatac

SEQ ID NO: 5995 - DNA, 21 bp, Artificial Sequence
  n-mer motif encoding polynucleotide
aacatagcaggcggagaacaa

SEQ ID NO: 5996 - DNA, 21 bp, Artificial Sequence
  n-mer motif encoding polynucleotide
gagattaataatcggactggt

SEQ ID NO: 5997 - DNA, 21 bp, Artificial Sequence
  n-mer motif encoding polynucleotide
accgttaacacaatgtacacg

SEQ ID NO: 5998 - DNA, 21 bp, Artificial Sequence
  n-mer motif encoding polynucleotide
cctatgaatggtattctgttg

SEQ ID NO: 5999 - DNA, 21 bp, Artificial Sequence
  n-mer motif encoding polynucleotide
aatcctagttatgatcatcgg

SEQ ID NO: 6000 - DNA, 21 bp, Artificial Sequence
  n-mer motif encoding polynucleotide
gctgttattctgaatcctgtt

SEQ ID NO: 6001 - DNA, 21 bp, Artificial Sequence
  n-mer motif encoding polynucleotide
ctgtacgggggagcacaccaa

SEQ ID NO: 6002 - DNA, 21 bp, Artificial Sequence
  n-mer motif encoding polynucleotide
caagtcaaccaaccgagaata

SEQ ID NO: 6003 - DNA, 21 bp, Artificial Sequence
  n-mer motif encoding polynucleotide
gctgttagaacaccggcaatg

SEQ ID NO: 6004 - DNA, 21 bp, Artificial Sequence
  n-mer motif encoding polynucleotide
agtttgacgcctaataatctt

SEQ ID NO: 6005 - DNA, 21 bp, Artificial Sequence
  n-mer motif encoding polynucleotide
cttgggcaggttaattctacg

SEQ ID NO: 6006 - DNA, 21 bp, Artificial Sequence
  n-mer motif encoding polynucleotide
gctaattctgctactaatcag

SEQ ID NO: 6007 - DNA, 21 bp, Artificial Sequence
  n-mer motif encoding polynucleotide
tccttgacggaaaaagcgccg

SEQ ID NO: 6008 - DNA, 21 bp, Artificial Sequence
  n-mer motif encoding polynucleotide
caattccacgggacatctgaa

SEQ ID NO: 6009 - DNA, 21 bp, Artificial Sequence
  n-mer motif encoding polynucleotide
aaaaacggcgccataggaaca

SEQ ID NO: 6010 - DNA, 21 bp, Artificial Sequence
  n-mer motif encoding polynucleotide
gtgctggcgtcgactgagaag

SEQ ID NO: 6011 - DNA, 21 bp, Artificial Sequence
  n-mer motif encoding polynucleotide
agtaatatgagtgaggcgatt

SEQ ID NO: 6012 - DNA, 21 bp, Artificial Sequence
  n-mer motif encoding polynucleotide
aacgctaacgccggtggaaac

SEQ ID NO: 6013 - DNA, 21 bp, Artificial Sequence
  n-mer motif encoding polynucleotide
cactctaacacacactacgaa

SEQ ID NO: 6014 - DNA, 21 bp, Artificial Sequence
  n-mer motif encoding polynucleotide
agtgctttgattagtgtggtt

SEQ ID NO: 6015 - DNA, 21 bp, Artificial Sequence
  n-mer motif encoding polynucleotide
gtggcgactcattataatgag

SEQ ID NO: 6016 - DNA, 21 bp, Artificial Sequence
  n-mer motif encoding polynucleotide
aaccaaacgttacaagtagac

SEQ ID NO: 6017 - DNA, 21 bp, Artificial Sequence
  n-mer motif encoding polynucleotide
aaaacaccctcagcttcagaa

SEQ ID NO: 6018 - DNA, 21 bp, Artificial Sequence
  n-mer motif encoding polynucleotide
ggtgaatcacgtacaaacatg

SEQ ID NO: 6019 - DNA, 21 bp, Artificial Sequence
  n-mer motif encoding polynucleotide
cggaatgagccggttagtact

SEQ ID NO: 6020 - DNA, 21 bp, Artificial Sequence
  n-mer motif encoding polynucleotide
gcaacacacgccatgcgccca

SEQ ID NO: 6021 - DNA, 21 bp, Artificial Sequence
  n-mer motif encoding polynucleotide
tgggaatccctctccaacgca

SEQ ID NO: 6022 - DNA, 21 bp, Artificial Sequence
  n-mer motif encoding polynucleotide
catagtcctcctacgactatg

SEQ ID NO: 6023 - DNA, 21 bp, Artificial Sequence
  n-mer motif encoding polynucleotide
tctaccatgaacacgatcacg

SEQ ID NO: 6024 - DNA, 21 bp, Artificial Sequence
  n-mer motif encoding polynucleotide
aacatggaacacaccatggcg

SEQ ID NO: 6025 - DNA, 21 bp, Artificial Sequence
  n-mer motif encoding polynucleotide
cataatacggagtctaagact

SEQ ID NO: 6026 - DNA, 21 bp, Artificial Sequence
  n-mer motif encoding polynucleotide
cacaacttaatgacccaaata

SEQ ID NO: 6027 - DNA, 21 bp, Artificial Sequence
  n-mer motif encoding polynucleotide
aaccaaaacacctacgaactg

SEQ ID NO: 6028 - DNA, 21 bp, Artificial Sequence
  n-mer motif encoding polynucleotide
tacgccactctcgacaccatc

SEQ ID NO: 6029 - DNA, 21 bp, Artificial Sequence
  n-mer motif encoding polynucleotide
gttcagttggagaatgcgaat

SEQ ID NO: 6030 - DNA, 21 bp, Artificial Sequence
  n-mer motif encoding polynucleotide
gggctcacaggatacacaatg

SEQ ID NO: 6031 - DNA, 21 bp, Artificial Sequence
  n-mer motif encoding polynucleotide
ttagtacttgactcacggaac

SEQ ID NO: 6032 - DNA, 21 bp, Artificial Sequence
  n-mer motif encoding polynucleotide
atgttggtacaaaacacaccc

SEQ ID NO: 6033 - DNA, 21 bp, Artificial Sequence
  n-mer motif encoding polynucleotide
cctcataatcaggagatgggt

SEQ ID NO: 6034 - DNA, 21 bp, Artificial Sequence
  n-mer motif encoding polynucleotide
tcgttgggggatgcgatgttg

SEQ ID NO: 6035 - DNA, 21 bp, Artificial Sequence
  n-mer motif encoding polynucleotide
cgcgccgaagggagctctggc

SEQ ID NO: 6036 - DNA, 21 bp, Artificial Sequence
  n-mer motif encoding polynucleotide
agtgaggagaggacgcgtgcg

SEQ ID NO: 6037 - DNA, 21 bp, Artificial Sequence
  n-mer motif encoding polynucleotide
tctagtaaggagcgtacatcg

SEQ ID NO: 6038 - DNA, 21 bp, Artificial Sequence
  n-mer motif encoding polynucleotide
cctgttgtgagggatcgttct

SEQ ID NO: 6039 - DNA, 21 bp, Artificial Sequence
  n-mer motif encoding polynucleotide
aggatgtctgagagttcggat

SEQ ID NO: 6040 - DNA, 21 bp, Artificial Sequence
  n-mer motif encoding polynucleotide
aaccaatctataagcatggac

SEQ ID NO: 6041 - DNA, 21 bp, Artificial Sequence
  n-mer motif encoding polynucleotide
gtcgctgtatcgaacactcca

SEQ ID NO: 6042 - DNA, 21 bp, Artificial Sequence
  n-mer motif encoding polynucleotide
ggagacatctcaagcagaaac

SEQ ID NO: 6043 - DNA, 21 bp, Artificial Sequence
  n-mer motif encoding polynucleotide
gctgccggagccgactctcca

SEQ ID NO: 6044 - DNA, 21 bp, Artificial Sequence
  n-mer motif encoding polynucleotide
ttcggcacatcgtacacaacc

SEQ ID NO: 6045 - DNA, 21 bp, Artificial Sequence
  n-mer motif encoding polynucleotide
cgtgatactaatacggataag

SEQ ID NO: 6046 - DNA, 21 bp, Artificial Sequence
  n-mer motif encoding polynucleotide
gggtctacgccgggggcgagt

SEQ ID NO: 6047 - DNA, 21 bp, Artificial Sequence
  n-mer motif encoding polynucleotide
ggtactaatcatgatttttcg

SEQ ID NO: 6048 - DNA, 21 bp, Artificial Sequence
  n-mer motif encoding polynucleotide
aatgagagtacgaaggagagt

SEQ ID NO: 6049 - DNA, 21 bp, Artificial Sequence
  n-mer motif encoding polynucleotide
gtgcatgtgactaatgtgttg

SEQ ID NO: 6050 - DNA, 21 bp, Artificial Sequence
  n-mer motif encoding polynucleotide
agtactactaatgttgcgtat

SEQ ID NO: 6051 - DNA, 21 bp, Artificial Sequence
  n-mer motif encoding polynucleotide
attacgtcgttgaatgggatg

SEQ ID NO: 6052 - DNA, 21 bp, Artificial Sequence
  n-mer motif encoding polynucleotide
gaagtacggggcagcgtgcca

SEQ ID NO: 6053 - DNA, 21 bp, Artificial Sequence
  n-mer motif encoding polynucleotide
gcacttacccgtatgcctaac

SEQ ID NO: 6054 - DNA, 21 bp, Artificial Sequence
  n-mer motif encoding polynucleotide
ctcagtgtagccgacaggcca

SEQ ID NO: 6055 - DNA, 21 bp, Artificial Sequence
  n-mer motif encoding polynucleotide
gtttctacggcgcagaggcag

SEQ ID NO: 6056 - DNA, 21 bp, Artificial Sequence
  n-mer motif encoding polynucleotide
ttaaacgcagaatacaccaac

SEQ ID NO: 6057 - DNA, 21 bp, Artificial Sequence
  n-mer motif encoding polynucleotide
aatgagaagccgcagtcgacg

SEQ ID NO: 6058 - DNA, 21 bp, Artificial Sequence
  n-mer motif encoding polynucleotide
ttgaatacgctgattgataag

SEQ ID NO: 6059 - DNA, 21 bp, Artificial Sequence
  n-mer motif encoding polynucleotide
gtcacacacacactgatcgaa

SEQ ID NO: 6060 - DNA, 21 bp, Artificial Sequence
  n-mer motif encoding polynucleotide
gagcagaagaagactgatcat

SEQ ID NO: 6061 - DNA, 21 bp, Artificial Sequence
  n-mer motif encoding polynucleotide
acatcaggcatgtacgacacg

SEQ ID NO: 6062 - DNA, 21 bp, Artificial Sequence
  n-mer motif encoding polynucleotide
cctgacgcagcgcgtagcccg

SEQ ID NO: 6063 - DNA, 21 bp, Artificial Sequence
  n-mer motif encoding polynucleotide
ttgacgcaggtttatcatgag

SEQ ID NO: 6064 - DNA, 21 bp, Artificial Sequence
  n-mer motif encoding polynucleotide
agagaaatgagcagcctatct

SEQ ID NO: 6065 - DNA, 21 bp, Artificial Sequence
  n-mer motif encoding polynucleotide
atgccttcgaaaggcgaagta

SEQ ID NO: 6066 - DNA, 21 bp, Artificial Sequence
  n-mer motif encoding polynucleotide
aatgagcagaatacgccgagt

SEQ ID NO: 6067 - DNA, 21 bp, Artificial Sequence
  n-mer motif encoding polynucleotide
aaaaactacgcaagcaccgac

SEQ ID NO: 6068 - DNA, 21 bp, Artificial Sequence
  n-mer motif encoding polynucleotide
tgtatggatgttggtaaggcg

SEQ ID NO: 6069 - DNA, 21 bp, Artificial Sequence
  n-mer motif encoding polynucleotide
gctcttcataatctgatgaat

SEQ ID NO: 6070 - DNA, 21 bp, Artificial Sequence
  n-mer motif encoding polynucleotide
cctgacagagcgaacgacaaa

SEQ ID NO: 6071 - DNA, 21 bp, Artificial Sequence
  n-mer motif encoding polynucleotide
attgctcatgtgtctactaat

SEQ ID NO: 6072 - DNA, 21 bp, Artificial Sequence
  n-mer motif encoding polynucleotide
aacggtccgaccggatccgcc

SEQ ID NO: 6073 - DNA, 21 bp, Artificial Sequence
  n-mer motif encoding polynucleotide
tctactcatcatgctgatcgt

SEQ ID NO: 6074 - DNA, 21 bp, Artificial Sequence
  n-mer motif encoding polynucleotide
ggttcgcagtatgggcggcat

SEQ ID NO: 6075 - DNA, 21 bp, Artificial Sequence
  n-mer motif encoding polynucleotide
accggaacggctacactccca

SEQ ID NO: 6076 - DNA, 21 bp, Artificial Sequence
  n-mer motif encoding polynucleotide
aaagcccacgttgtagaaata

SEQ ID NO: 6077 - DNA, 21 bp, Artificial Sequence
  n-mer motif encoding polynucleotide
acttcgcagggtaggagtcct

SEQ ID NO: 6078 - DNA, 21 bp, Artificial Sequence
  n-mer motif encoding polynucleotide
ttatcctccgaatcacccagg

SEQ ID NO: 6079 - DNA, 21 bp, Artificial Sequence
  n-mer motif encoding polynucleotide
accggggttcgagaaaccata

SEQ ID NO: 6080 - DNA, 21 bp, Artificial Sequence
  n-mer motif encoding polynucleotide
atggatactgagctttatagg

SEQ ID NO: 6081 - DNA, 21 bp, Artificial Sequence
  n-mer motif encoding polynucleotide
acacctgaagcgagcgctcgc

SEQ ID NO: 6082 - DNA, 21 bp, Artificial Sequence
  n-mer motif encoding polynucleotide
cacgacttgaaccacggaaaa

SEQ ID NO: 6083 - DNA, 21 bp, Artificial Sequence
  n-mer motif encoding polynucleotide
cttactggtcagaatgcgatt

SEQ ID NO: 6084 - DNA, 21 bp, Artificial Sequence
  n-mer motif encoding polynucleotide
accgtcggatcgaacagtata

SEQ ID NO: 6085 - DNA, 21 bp, Artificial Sequence
  n-mer motif encoding polynucleotide
catactgtgggggctatgcat

SEQ ID NO: 6086 - DNA, 21 bp, Artificial Sequence
  n-mer motif encoding polynucleotide
gaacgagtcaacgggatggca

SEQ ID NO: 6087 - DNA, 21 bp, Artificial Sequence
  n-mer motif encoding polynucleotide
tccgaaccccttagagttgga

SEQ ID NO: 6088 - DNA, 21 bp, Artificial Sequence
  n-mer motif encoding polynucleotide
gtctctaacgtcctctacagc

SEQ ID NO: 6089 - DNA, 21 bp, Artificial Sequence
  n-mer motif encoding polynucleotide
ttctcctccggaacaaccata

SEQ ID NO: 6090 - DNA, 21 bp, Artificial Sequence
  n-mer motif encoding polynucleotide
acaaacctaagtcaatcggcc

SEQ ID NO: 6091 - DNA, 21 bp, Artificial Sequence
  n-mer motif encoding polynucleotide
cctaatactgctagtaatttt

SEQ ID NO: 6092 - DNA, 21 bp, Artificial Sequence
  n-mer motif encoding polynucleotide
tgcggcctgaactgcggtaaa

SEQ ID NO: 6093 - DNA, 21 bp, Artificial Sequence
  n-mer motif encoding polynucleotide
ccgaccggaggctcaccacca

SEQ ID NO: 6094 - DNA, 21 bp, Artificial Sequence
  n-mer motif encoding polynucleotide
tacctagaatccaactacacc

SEQ ID NO: 6095 - DNA, 21 bp, Artificial Sequence
  n-mer motif encoding polynucleotide
acattagaaacaacccgcagc

SEQ ID NO: 6096 - DNA, 21 bp, Artificial Sequence
  n-mer motif encoding polynucleotide
tccgctaacgaacacaaccac

SEQ ID NO: 6097 - DNA, 21 bp, Artificial Sequence
  n-mer motif encoding polynucleotide
gcacgagtggacaccaaccaa

SEQ ID NO: 6098 - DNA, 21 bp, Artificial Sequence
  n-mer motif encoding polynucleotide
aacgtggtgaaaaacaacaca

SEQ ID NO: 6099 - DNA, 21 bp, Artificial Sequence
  n-mer motif encoding polynucleotide
ggttcttattctgatggtagt

SEQ ID NO: 6100 - DNA, 21 bp, Artificial Sequence
  n-mer motif encoding polynucleotide
cccggtaacggacaaagtccg

SEQ ID NO: 6101 - DNA, 21 bp, Artificial Sequence
  n-mer motif encoding polynucleotide
tcgggggtaaacttcggagta

SEQ ID NO: 6102 - DNA, 21 bp, Artificial Sequence
  n-mer motif encoding polynucleotide
cgaatcaacgcagcaatcgac

SEQ ID NO: 6103 - DNA, 21 bp, Artificial Sequence
  n-mer motif encoding polynucleotide
caagctgggaacgcgccaagg

SEQ ID NO: 6104 - DNA, 21 bp, Artificial Sequence
  n-mer motif encoding polynucleotide
cagtcggggtctctggtgccg

SEQ ID NO: 6105 - DNA, 21 bp, Artificial Sequence
  n-mer motif encoding polynucleotide
ttctcaacgcaagacataagc

SEQ ID NO: 6106 - DNA, 21 bp, Artificial Sequence
  n-mer motif encoding polynucleotide
gtgaatccgcatcctgcgcag

SEQ ID NO: 6107 - DNA, 21 bp, Artificial Sequence
  n-mer motif encoding polynucleotide
aaaggccacgcctacgaagcc

SEQ ID NO: 6108 - DNA, 21 bp, Artificial Sequence
  n-mer motif encoding polynucleotide
gaagacagtatgagattctct

SEQ ID NO: 6109 - DNA, 21 bp, Artificial Sequence
  n-mer motif encoding polynucleotide
ggtaggaatgagagtccggag

SEQ ID NO: 6110 - DNA, 21 bp, Artificial Sequence
  n-mer motif encoding polynucleotide
tccgacggatcgaaactacta

SEQ ID NO: 6111 - DNA, 21 bp, Artificial Sequence
  n-mer motif encoding polynucleotide
actctctcaggctacatgaga

SEQ ID NO: 6112 - DNA, 21 bp, Artificial Sequence
  n-mer motif encoding polynucleotide
gatattcataatccgcgtacg

SEQ ID NO: 6113 - DNA, 21 bp, Artificial Sequence
  n-mer motif encoding polynucleotide
tgggccaaagacgtcaacgtc

SEQ ID NO: 6114 - DNA, 21 bp, Artificial Sequence
  n-mer motif encoding polynucleotide
gctgtggggcggtcggatgat

SEQ ID NO: 6115 - DNA, 21 bp, Artificial Sequence
  n-mer motif encoding polynucleotide
aaagaaaaaaccacccgcgaa

SEQ ID NO: 6116 - DNA, 21 bp, Artificial Sequence
  n-mer motif encoding polynucleotide
ctgctccaatcgacctacttg

SEQ ID NO: 6117 - DNA, 21 bp, Artificial Sequence
  n-mer motif encoding polynucleotide
aagtctaatttggagggtaag

SEQ ID NO: 6118 - DNA, 21 bp, Artificial Sequence
  n-mer motif encoding polynucleotide
acgaggacgccttttctgggg

SEQ ID NO: 6119 - DNA, 21 bp, Artificial Sequence
  n-mer motif encoding polynucleotide
cagtcggatacgacttcgatt

SEQ ID NO: 6120 - DNA, 21 bp, Artificial Sequence
  n-mer motif encoding polynucleotide
gcgtggtctcaagtcctgacg

SEQ ID NO: 6121 - DNA, 21 bp, Artificial Sequence
  n-mer motif encoding polynucleotide
actcaagaacgaccactaatc

SEQ ID NO: 6122 - DNA, 21 bp, Artificial Sequence
  n-mer motif encoding polynucleotide
gatgataagactggtcggtat

SEQ ID NO: 6123 - DNA, 21 bp, Artificial Sequence
  n-mer motif encoding polynucleotide
tttccttcgcataatggggcg

SEQ ID NO: 6124 - DNA, 21 bp, Artificial Sequence
  n-mer motif encoding polynucleotide
atgctgtctcaagtcttaaca

SEQ ID NO: 6125 - DNA, 21 bp, Artificial Sequence
  n-mer motif encoding polynucleotide
tctgtgacgactaatctgatg

SEQ ID NO: 6126 - DNA, 21 bp, Artificial Sequence
  n-mer motif encoding polynucleotide
gaacacaactcaaaaacttac

SEQ ID NO: 6127 - DNA, 21 bp, Artificial Sequence
  n-mer motif encoding polynucleotide
tatgcgcatcctgtgactcat

SEQ ID NO: 6128 - DNA, 21 bp, Artificial Sequence
  n-mer motif encoding polynucleotide
cctaatccgtctccgaggcag

SEQ ID NO: 6129 - DNA, 21 bp, Artificial Sequence
  n-mer motif encoding polynucleotide
catatgggtttgaatgagctt

SEQ ID NO: 6130 - DNA, 21 bp, Artificial Sequence
  n-mer motif encoding polynucleotide
aacagtttgcaagcaagtgca

SEQ ID NO: 6131 - DNA, 21 bp, Artificial Sequence
  n-mer motif encoding polynucleotide
gacctcggtacggctagaacc

SEQ ID NO: 6132 - DNA, 21 bp, Artificial Sequence
  n-mer motif encoding polynucleotide
tacgacagccgactctacgcg

SEQ ID NO: 6133 - DNA, 21 bp, Artificial Sequence
  n-mer motif encoding polynucleotide
ccgaagcctgggacgggggag

SEQ ID NO: 6134 - DNA, 21 bp, Artificial Sequence
  n-mer motif encoding polynucleotide
agtctgaatggggtgttggtt

SEQ ID NO: 6135 - DNA, 21 bp, Artificial Sequence
  n-mer motif encoding polynucleotide
cagtctaatttggttattaat

SEQ ID NO: 6136 - DNA, 21 bp, Artificial Sequence
  n-mer motif encoding polynucleotide
gcgtctccggcgcagaccggc

SEQ ID NO: 6137 - DNA, 21 bp, Artificial Sequence
  n-mer motif encoding polynucleotide
aacatgaccaacgaaaacgga

SEQ ID NO: 6138 - DNA, 21 bp, Artificial Sequence
  n-mer motif encoding polynucleotide
tcacttcggacggacgaattc

SEQ ID NO: 6139 - DNA, 21 bp, Artificial Sequence
  n-mer motif encoding polynucleotide
atattggacaaccaccgtttc

SEQ ID NO: 6140 - DNA, 21 bp, Artificial Sequence
  n-mer motif encoding polynucleotide
ttgattaatatgagtcagaat

SEQ ID NO: 6141 - DNA, 21 bp, Artificial Sequence
  n-mer motif encoding polynucleotide
ccgcaagacgtccgccaaaca

SEQ ID NO: 6142 - DNA, 21 bp, Artificial Sequence
  n-mer motif encoding polynucleotide
cccttcgtagcgaacgaacca

SEQ ID NO: 6143 - DNA, 21 bp, Artificial Sequence
  n-mer motif encoding polynucleotide
aatattaatgatactaagaat

SEQ ID NO: 6144 - DNA, 21 bp, Artificial Sequence
  n-mer motif encoding polynucleotide
aattttagtagtggtgatgtt

SEQ ID NO: 6145 - DNA, 21 bp, Artificial Sequence
  n-mer motif encoding polynucleotide
gaacgaaacggactaatagaa

SEQ ID NO: 6146 - DNA, 21 bp, Artificial Sequence
  n-mer motif encoding polynucleotide
aattctcatgttcctaataat

SEQ ID NO: 6147 - DNA, 21 bp, Artificial Sequence
  n-mer motif encoding polynucleotide
aacacaaccggtagctcgggc

SEQ ID NO: 6148 - DNA, 21 bp, Artificial Sequence
  n-mer motif encoding polynucleotide
tcaaccagaaaagaacacgac

SEQ ID NO: 6149 - DNA, 21 bp, Artificial Sequence
  n-mer motif encoding polynucleotide
gctgctaatcctagtacggag

SEQ ID NO: 6150 - DNA, 21 bp, Artificial Sequence
  n-mer motif encoding polynucleotide
tcgggtatgaatagtaataag

SEQ ID NO: 6151 - DNA, 21 bp, Artificial Sequence
  n-mer motif encoding polynucleotide
aagacgcttgataataatgct

SEQ ID NO: 6152 - DNA, 21 bp, Artificial Sequence
  n-mer motif encoding polynucleotide
accgtaaaacaaacaagtccg

SEQ ID NO: 6153 - DNA, 21 bp, Artificial Sequence
  n-mer motif encoding polynucleotide
atttctcaggtgtcttttaat

SEQ ID NO: 6154 - DNA, 21 bp, Artificial Sequence
  n-mer motif encoding polynucleotide
ttagaagtaaacctgcaaacg

SEQ ID NO: 6155 - DNA, 21 bp, Artificial Sequence
  n-mer motif encoding polynucleotide
gaaatgcaaaccaaaaacgcc

SEQ ID NO: 6156 - DNA, 21 bp, Artificial Sequence
  n-mer motif encoding polynucleotide
gccgacaacagaaacgacaaa

SEQ ID NO: 6157 - DNA, 21 bp, Artificial Sequence
  n-mer motif encoding polynucleotide
gcgtatgatacgctgaatagt

SEQ ID NO: 6158 - DNA, 21 bp, Artificial Sequence
  n-mer motif encoding polynucleotide
acgattcaggatcatattaag

SEQ ID NO: 6159 - DNA, 21 bp, Artificial Sequence
  n-mer motif encoding polynucleotide
gaccccactaaagttggatcc

SEQ ID NO: 6160 - DNA, 21 bp, Artificial Sequence
  n-mer motif encoding polynucleotide
tccctccaacgaacccccgac

SEQ ID NO: 6161 - DNA, 21 bp, Artificial Sequence
  n-mer motif encoding polynucleotide
gcaaacgactctgccaaaaca

SEQ ID NO: 6162 - DNA, 21 bp, Artificial Sequence
  n-mer motif encoding polynucleotide
aaaaaagtcgaacaagaacca

SEQ ID NO: 6163 - DNA, 21 bp, Artificial Sequence
  n-mer motif encoding polynucleotide
gcaagtcgggacctgggacaa

SEQ ID NO: 6164 - DNA, 21 bp, Artificial Sequence
  n-mer motif encoding polynucleotide
tgggagagtgataagtttcgt

SEQ ID NO: 6165 - DNA, 21 bp, Artificial Sequence
  n-mer motif encoding polynucleotide
aaccgcggaacagaagtttac

SEQ ID NO: 6166 - DNA, 21 bp, Artificial Sequence
  n-mer motif encoding polynucleotide
aatattagtagtattaatcag

SEQ ID NO: 6167 - DNA, 21 bp, Artificial Sequence
  n-mer motif encoding polynucleotide
gcctcgaaaggcttcggccac

SEQ ID NO: 6168 - DNA, 21 bp, Artificial Sequence
  n-mer motif encoding polynucleotide
cagtcgcagaatgtgactcag

SEQ ID NO: 6169 - DNA, 21 bp, Artificial Sequence
  n-mer motif encoding polynucleotide
aacggataccaactacaaatc

SEQ ID NO: 6170 - DNA, 21 bp, Artificial Sequence
  n-mer motif encoding polynucleotide
tgtactaatgcgtcggatctt

SEQ ID NO: 6171 - DNA, 21 bp, Artificial Sequence
  n-mer motif encoding polynucleotide
accgtcgcctcgcccaacacc

SEQ ID NO: 6172 - DNA, 21 bp, Artificial Sequence
  n-mer motif encoding polynucleotide
aatactgctccgccgaatcat

SEQ ID NO: 6173 - DNA, 21 bp, Artificial Sequence
  n-mer motif encoding polynucleotide
ctttctcaacaacgcgactac

SEQ ID NO: 6174 - DNA, 21 bp, Artificial Sequence
  n-mer motif encoding polynucleotide
tggaatcagaatgtgtctcat

SEQ ID NO: 6175 - DNA, 21 bp, Artificial Sequence
  n-mer motif encoding polynucleotide
acaggtagttcagacagatta

SEQ ID NO: 6176 - DNA, 21 bp, Artificial Sequence
  n-mer motif encoding polynucleotide
aacacaacgccacctaaccac

SEQ ID NO: 6177 - DNA, 21 bp, Artificial Sequence
  n-mer motif encoding polynucleotide
gtggtcgactcaacatacccg

SEQ ID NO: 6178 - DNA, 21 bp, Artificial Sequence
  n-mer motif encoding polynucleotide
acggatgctacggggaggcat

SEQ ID NO: 6179 - DNA, 21 bp, Artificial Sequence
  n-mer motif encoding polynucleotide
ttgtttactgctgggagtact

SEQ ID NO: 6180 - DNA, 21 bp, Artificial Sequence
  n-mer motif encoding polynucleotide
ttgcgtgatcagactagtatg

SEQ ID NO: 6181 - DNA, 21 bp, Artificial Sequence
  n-mer motif encoding polynucleotide
atcgaaacggaccgccaccgg

SEQ ID NO: 6182 - DNA, 21 bp, Artificial Sequence
  n-mer motif encoding polynucleotide
agtgggcctgagaatacgttg

SEQ ID NO: 6183 - DNA, 21 bp, Artificial Sequence
  n-mer motif encoding polynucleotide
gacaaccaaaacgccgacagg

SEQ ID NO: 6184 - DNA, 21 bp, Artificial Sequence
  n-mer motif encoding polynucleotide
catgatggttatgttcctaat

SEQ ID NO: 6185 - DNA, 21 bp, Artificial Sequence
  n-mer motif encoding polynucleotide
catatgtctagttattcgtcg

SEQ ID NO: 6186 - DNA, 21 bp, Artificial Sequence
  n-mer motif encoding polynucleotide
agtcgtctgcagactcagcag

SEQ ID NO: 6187 - DNA, 21 bp, Artificial Sequence
  n-mer motif encoding polynucleotide
tcatacacagcaggaagaccc

SEQ ID NO: 6188 - DNA, 21 bp, Artificial Sequence
  n-mer motif encoding polynucleotide
gtgcagcagaataatattaat

SEQ ID NO: 6189 - DNA, 21 bp, Artificial Sequence
  n-mer motif encoding polynucleotide
gatgcgaaggctcttacgact

SEQ ID NO: 6190 - DNA, 21 bp, Artificial Sequence
  n-mer motif encoding polynucleotide
aaggatgagcatcttcattat

SEQ ID NO: 6191 - DNA, 21 bp, Artificial Sequence
  n-mer motif encoding polynucleotide
cacggtgaccgaacagcttta

SEQ ID NO: 6192 - DNA, 21 bp, Artificial Sequence
  n-mer motif encoding polynucleotide
aattttactattacggaggcg

SEQ ID NO: 6193 - DNA, 21 bp, Artificial Sequence
  n-mer motif encoding polynucleotide
gacactcacatgaacaaactg

SEQ ID NO: 6194 - DNA, 21 bp, Artificial Sequence
  n-mer motif encoding polynucleotide
caaccaggagccccccaaacc

SEQ ID NO: 6195 - DNA, 21 bp, Artificial Sequence
  n-mer motif encoding polynucleotide
ggggaagcacgccgagaagcc

SEQ ID NO: 6196 - DNA, 21 bp, Artificial Sequence
  n-mer motif encoding polynucleotide
aagtctcttagtagtgatgat

SEQ ID NO: 6197 - DNA, 21 bp, Artificial Sequence
  n-mer motif encoding polynucleotide
atgaatacgacttataatgag

SEQ ID NO: 6198 - DNA, 21 bp, Artificial Sequence
  n-mer motif encoding polynucleotide
gcggccgcactagaaacaata

SEQ ID NO: 6199 - DNA, 21 bp, Artificial Sequence
  n-mer motif encoding polynucleotide
aacgtcgctccctacagtagc

SEQ ID NO: 6200 - DNA, 21 bp, Artificial Sequence
  n-mer motif encoding polynucleotide
tctgcgggtatggtgagtctg

SEQ ID NO: 6201 - DNA, 21 bp, Artificial Sequence
  n-mer motif encoding polynucleotide
tgcgacttgtcacaatcatgc

SEQ ID NO: 6202 - DNA, 21 bp, Artificial Sequence
  n-mer motif encoding polynucleotide
gttttgattacgatgagttcg

SEQ ID NO: 6203 - DNA, 21 bp, Artificial Sequence
  n-mer motif encoding polynucleotide
caagttggggctctaatggtt

SEQ ID NO: 6204 - DNA, 21 bp, Artificial Sequence
  n-mer motif encoding polynucleotide
caacgtacctcggaagcgcca

SEQ ID NO: 6205 - DNA, 21 bp, Artificial Sequence
  n-mer motif encoding polynucleotide
ttgggtaatggtagttctttg

SEQ ID NO: 6206 - DNA, 21 bp, Artificial Sequence
  n-mer motif encoding polynucleotide
cctagtgtccgtttgccctta

SEQ ID NO: 6207 - DNA, 21 bp, Artificial Sequence
  n-mer motif encoding polynucleotide
gattctgctccgagtactatt

SEQ ID NO: 6208 - DNA, 21 bp, Artificial Sequence
  n-mer motif encoding polynucleotide
aattataatggggttaatgtg

SEQ ID NO: 6209 - DNA, 21 bp, Artificial Sequence
  n-mer motif encoding polynucleotide
tcggctcatcagacgccgacg

SEQ ID NO: 6210 - DNA, 21 bp, Artificial Sequence
  n-mer motif encoding polynucleotide
gatcatagtaagcagatttcg

SEQ ID NO: 6211 - DNA, 21 bp, Artificial Sequence
  n-mer motif encoding polynucleotide
gccgccagcttgtcgcaaagc

SEQ ID NO: 6212 - DNA, 21 bp, Artificial Sequence
  n-mer motif encoding polynucleotide
cacgccgacgttggcatgagc

SEQ ID NO: 6213 - DNA, 21 bp, Artificial Sequence
  n-mer motif encoding polynucleotide
cacgtgacagtaacgttaaac

SEQ ID NO: 6214 - DNA, 21 bp, Artificial Sequence
  n-mer motif encoding polynucleotide
aattctacgcatattaattcg

SEQ ID NO: 6215 - DNA, 21 bp, Artificial Sequence
  n-mer motif encoding polynucleotide
ctggggcttgctggtcaggtt

SEQ ID NO: 6216 - DNA, 21 bp, Artificial Sequence
  n-mer motif encoding polynucleotide
agcagtcaagcccacggccca

SEQ ID NO: 6217 - DNA, 21 bp, Artificial Sequence
  n-mer motif encoding polynucleotide
gcttttaagtcgggtagtatt

SEQ ID NO: 6218 - DNA, 21 bp, Artificial Sequence
  n-mer motif encoding polynucleotide
cactccccatcccacgactcg

SEQ ID NO: 6219 - DNA, 21 bp, Artificial Sequence
  n-mer motif encoding polynucleotide
ccaaacggcgaaagttcgcga

SEQ ID NO: 6220 - DNA, 21 bp, Artificial Sequence
  n-mer motif encoding polynucleotide
attcttacgcctttggataag

SEQ ID NO: 6221 - DNA, 21 bp, Artificial Sequence
  n-mer motif encoding polynucleotide
tccgcctcttactccaggatg

SEQ ID NO: 6222 - DNA, 21 bp, Artificial Sequence
  n-mer motif encoding polynucleotide
gaggcgttgcatgatcggaat

SEQ ID NO: 6223 - DNA, 21 bp, Artificial Sequence
  n-mer motif encoding polynucleotide
ggtgaacaacacaacgccccc

SEQ ID NO: 6224 - DNA, 21 bp, Artificial Sequence
  n-mer motif encoding polynucleotide
gggaatatggttacgcctaat

SEQ ID NO: 6225 - DNA, 21 bp, Artificial Sequence
  n-mer motif encoding polynucleotide
aacgctctcctcaacgcacct

SEQ ID NO: 6226 - DNA, 21 bp, Artificial Sequence
  n-mer motif encoding polynucleotide
gcaagtgacctacaaatgacg

SEQ ID NO: 6227 - DNA, 21 bp, Artificial Sequence
  n-mer motif encoding polynucleotide
tcgtatgatatgcatacgaat

SEQ ID NO: 6228 - DNA, 21 bp, Artificial Sequence
  n-mer motif encoding polynucleotide
aatatgtcgcatagtactctg

SEQ ID NO: 6229 - DNA, 21 bp, Artificial Sequence
  n-mer motif encoding polynucleotide
actgccaacaaccactctccg

SEQ ID NO: 6230 - DNA, 21 bp, Artificial Sequence
  n-mer motif encoding polynucleotide
caagccccgccaacagcacaa

SEQ ID NO: 6231 - DNA, 21 bp, Artificial Sequence
  n-mer motif encoding polynucleotide
aactaccacggagacaacgtt

SEQ ID NO: 6232 - DNA, 21 bp, Artificial Sequence
  n-mer motif encoding polynucleotide
agggatagtactattagtcgg

SEQ ID NO: 6233 - DNA, 21 bp, Artificial Sequence
  n-mer motif encoding polynucleotide
gtttcttcgcctaatggtacg

SEQ ID NO: 6234 - DNA, 21 bp, Artificial Sequence
  n-mer motif encoding polynucleotide
tcccgaatcacggtgaacgca

SEQ ID NO: 6235 - DNA, 21 bp, Artificial Sequence
  n-mer motif encoding polynucleotide
gtcggaacaacctcgaacggc

SEQ ID NO: 6236 - DNA, 21 bp, Artificial Sequence
  n-mer motif encoding polynucleotide
catacgaatcagatgcagcct

SEQ ID NO: 6237 - DNA, 21 bp, Artificial Sequence
  n-mer motif encoding polynucleotide
aaaagcaacgcgggattcggt

SEQ ID NO: 6238 - DNA, 21 bp, Artificial Sequence
  n-mer motif encoding polynucleotide
aaagaaagcctcgaagacgtc

SEQ ID NO: 6239 - DNA, 21 bp, Artificial Sequence
  n-mer motif encoding polynucleotide
gcgcaggttaataatcatgat

SEQ ID NO: 6240 - DNA, 21 bp, Artificial Sequence
  n-mer motif encoding polynucleotide
aacgcttctacctacatggac

SEQ ID NO: 6241 - DNA, 21 bp, Artificial Sequence
  n-mer motif encoding polynucleotide
acgtctgatacgaatgctagg

SEQ ID NO: 6242 - DNA, 21 bp, Artificial Sequence
  n-mer motif encoding polynucleotide
gagagtcgtatgcgtagtatt

SEQ ID NO: 6243 - DNA, 21 bp, Artificial Sequence
  n-mer motif encoding polynucleotide
cgtgttgaagacaccaactcc

SEQ ID NO: 6244 - DNA, 21 bp, Artificial Sequence
  n-mer motif encoding polynucleotide
gcctctaaccacctacaagcc

SEQ ID NO: 6245 - DNA, 21 bp, Artificial Sequence
  n-mer motif encoding polynucleotide
cgcttacacggctcagactcg

SEQ ID NO: 6246 - DNA, 21 bp, Artificial Sequence
  n-mer motif encoding polynucleotide
accgtcgaacaaataaactcg

SEQ ID NO: 6247 - DNA, 21 bp, Artificial Sequence
  n-mer motif encoding polynucleotide
aggtccgtaccatcaccacac

SEQ ID NO: 6248 - DNA, 21 bp, Artificial Sequence
  n-mer motif encoding polynucleotide
gaatacctcgccctgggacac

SEQ ID NO: 6249 - DNA, 21 bp, Artificial Sequence
  n-mer motif encoding polynucleotide
aatactaataatcaggagcag

SEQ ID NO: 6250 - DNA, 21 bp, Artificial Sequence
  n-mer motif encoding polynucleotide
aactacggttccggacgaatc

SEQ ID NO: 6251 - DNA, 21 bp, Artificial Sequence
  n-mer motif encoding polynucleotide
cgccacggggacacaccgatg

SEQ ID NO: 6252 - DNA, 21 bp, Artificial Sequence
  n-mer motif encoding polynucleotide
aacgacaccatcggcagacca

SEQ ID NO: 6253 - DNA, 21 bp, Artificial Sequence
  n-mer motif encoding polynucleotide
tatggggagcgtgctaggacg

SEQ ID NO: 6254 - DNA, 21 bp, Artificial Sequence
  n-mer motif encoding polynucleotide
gttcttgggatgcagaggtct

SEQ ID NO: 6255 - DNA, 21 bp, Artificial Sequence
  n-mer motif encoding polynucleotide
cttcattttcatgcttcgcag

SEQ ID NO: 6256 - DNA, 21 bp, Artificial Sequence
  n-mer motif encoding polynucleotide
accgacacgctcagcgaaaga

SEQ ID NO: 6257 - DNA, 21 bp, Artificial Sequence
  n-mer motif encoding polynucleotide
gggacaggtaccgttggatgg

SEQ ID NO: 6258 - DNA, 21 bp, Artificial Sequence
  n-mer motif encoding polynucleotide
acagaaagccccaaactacta

SEQ ID NO: 6259 - DNA, 21 bp, Artificial Sequence
  n-mer motif encoding polynucleotide
acgattaggagtgagggtttt

SEQ ID NO: 6260 - DNA, 21 bp, Artificial Sequence
  n-mer motif encoding polynucleotide
gcgtctagttatattaataat

SEQ ID NO: 6261 - DNA, 21 bp, Artificial Sequence
  n-mer motif encoding polynucleotide
ttacaccttgggttatcatct

SEQ ID NO: 6262 - DNA, 21 bp, Artificial Sequence
  n-mer motif encoding polynucleotide
gtcactggcactaccccggga

SEQ ID NO: 6263 - DNA, 21 bp, Artificial Sequence
  n-mer motif encoding polynucleotide
gtgacgtcgtctgctagtggt

SEQ ID NO: 6264 - DNA, 21 bp, Artificial Sequence
  n-mer motif encoding polynucleotide
caaatgcacctacacatgcaa

SEQ ID NO: 6265 - DNA, 21 bp, Artificial Sequence
  n-mer motif encoding polynucleotide
ggtaccatgagtctattaatg

SEQ ID NO: 6266 - DNA, 21 bp, Artificial Sequence
  n-mer motif encoding polynucleotide
tgcgcatcagaagtttgccaa

SEQ ID NO: 6267 - DNA, 21 bp, Artificial Sequence
  n-mer motif encoding polynucleotide
aatcttgtgatgagtgggacg

SEQ ID NO: 6268 - DNA, 21 bp, Artificial Sequence
  n-mer motif encoding polynucleotide
caatcactcaaagacggcact

SEQ ID NO: 6269 - DNA, 21 bp, Artificial Sequence
  n-mer motif encoding polynucleotide
gcgttgaatggttctggtatt

SEQ ID NO: 6270 - DNA, 21 bp, Artificial Sequence
  n-mer motif encoding polynucleotide
agacacgtcgtccccgactcc

SEQ ID NO: 6271 - DNA, 21 bp, Artificial Sequence
  n-mer motif encoding polynucleotide
ctgtatcatgattcgcatctt

SEQ ID NO: 6272 - DNA, 21 bp, Artificial Sequence
  n-mer motif encoding polynucleotide
gggagtacgcctattacttct

SEQ ID NO: 6273 - DNA, 21 bp, Artificial Sequence
  n-mer motif encoding polynucleotide
cccaacgaccaaatcagcgga

SEQ ID NO: 6274 - DNA, 21 bp, Artificial Sequence
  n-mer motif encoding polynucleotide
agtggaaaacaagacaaatac

SEQ ID NO: 6275 - DNA, 21 bp, Artificial Sequence
  n-mer motif encoding polynucleotide
agtgggcatgcttctcagggt

SEQ ID NO: 6276 - DNA, 21 bp, Artificial Sequence
  n-mer motif encoding polynucleotide
aagatggggagtattgaggtt

SEQ ID NO: 6277 - DNA, 21 bp, Artificial Sequence
  n-mer motif encoding polynucleotide
tcaactttagaccgaagcgaa

SEQ ID NO: 6278 - DNA, 21 bp, Artificial Sequence
  n-mer motif encoding polynucleotide
acggagcttagtgagtatact

SEQ ID NO: 6279 - DNA, 21 bp, Artificial Sequence
  n-mer motif encoding polynucleotide
gccaacggaggaggatacccc

SEQ ID NO: 6280 - DNA, 21 bp, Artificial Sequence
  n-mer motif encoding polynucleotide
gtaaccgaatctaactctcta

SEQ ID NO: 6281 - DNA, 21 bp, Artificial Sequence
  n-mer motif encoding polynucleotide
ccagtctacgaccgcgacgtc

SEQ ID NO: 6282 - DNA, 21 bp, Artificial Sequence
  n-mer motif encoding polynucleotide
gataataataagcatggtact

SEQ ID NO: 6283 - DNA, 21 bp, Artificial Sequence
  n-mer motif encoding polynucleotide
atctacgaaaccgtaaccttg

SEQ ID NO: 6284 - DNA, 21 bp, Artificial Sequence
  n-mer motif encoding polynucleotide
actcagactggtcatgtttct

SEQ ID NO: 6285 - DNA, 21 bp, Artificial Sequence
  n-mer motif encoding polynucleotide
caagccgacctcaggtacaaa

SEQ ID NO: 6286 - DNA, 21 bp, Artificial Sequence
  n-mer motif encoding polynucleotide
tgtaagacgaataatgctggt

SEQ ID NO: 6287 - DNA, 21 bp, Artificial Sequence
  n-mer motif encoding polynucleotide
gccggtcaccaacaactggcc

SEQ ID NO: 6288 - DNA, 21 bp, Artificial Sequence
  n-mer motif encoding polynucleotide
gatagggatatggagggtgtt

SEQ ID NO: 6289 - DNA, 21 bp, Artificial Sequence
  n-mer motif encoding polynucleotide
gatcagccggggtatgtgcgt

SEQ ID NO: 6290 - DNA, 21 bp, Artificial Sequence
  n-mer motif encoding polynucleotide
gatgctatgcttgctcatccg

SEQ ID NO: 6291 - DNA, 21 bp, Artificial Sequence
  n-mer motif encoding polynucleotide
gcccttaacctgtactccagc

SEQ ID NO: 6292 - DNA, 21 bp, Artificial Sequence
  n-mer motif encoding polynucleotide
ctactatctaaaggggactcc

SEQ ID NO: 6293 - DNA, 21 bp, Artificial Sequence
  n-mer motif encoding polynucleotide
tcgagtattagtctgcggtat

SEQ ID NO: 6294 - DNA, 21 bp, Artificial Sequence
  n-mer motif encoding polynucleotide
gggtcgagccaacaccacgaa

SEQ ID NO: 6295 - DNA, 21 bp, Artificial Sequence
  n-mer motif encoding polynucleotide
tcgattgggtattcgcctccg

SEQ ID NO: 6296 - DNA, 21 bp, Artificial Sequence
  n-mer motif encoding polynucleotide
cactccaacgcgactacgata

SEQ ID NO: 6297 - DNA, 21 bp, Artificial Sequence
  n-mer motif encoding polynucleotide
tcggcacacgacgcaagacta

SEQ ID NO: 6298 - DNA, 21 bp, Artificial Sequence
  n-mer motif encoding polynucleotide
gttcacaccgcagacacaata

SEQ ID NO: 6299 - DNA, 21 bp, Artificial Sequence
  n-mer motif encoding polynucleotide
cgagacggctctactaaagtt

SEQ ID NO: 6300 - DNA, 21 bp, Artificial Sequence
  n-mer motif encoding polynucleotide
ttgcaggagtctcttcctggt

SEQ ID NO: 6301 - DNA, 21 bp, Artificial Sequence
  n-mer motif encoding polynucleotide
ttagactacacccctcaaaac

SEQ ID NO: 6302 - DNA, 21 bp, Artificial Sequence
  n-mer motif encoding polynucleotide
ggaccaagttcgcacatcgtt

SEQ ID NO: 6303 - DNA, 21 bp, Artificial Sequence
  n-mer motif encoding polynucleotide
agcgccgacacccggtccccc

SEQ ID NO: 6304 - DNA, 21 bp, Artificial Sequence
  n-mer motif encoding polynucleotide
atgatgaagagtgaggagaat

SEQ ID NO: 6305 - DNA, 21 bp, Artificial Sequence
  n-mer motif encoding polynucleotide
ggtatgacgagtgagttgacg

SEQ ID NO: 6306 - DNA, 21 bp, Artificial Sequence
  n-mer motif encoding polynucleotide
gtagacacctacagcggtctg

SEQ ID NO: 6307 - DNA, 21 bp, Artificial Sequence
  n-mer motif encoding polynucleotide
gggatgagggatacgccgccg

SEQ ID NO: 6308 - DNA, 21 bp, Artificial Sequence
  n-mer motif encoding polynucleotide
gagcatgatgtgagtacgcgt

SEQ ID NO: 6309 - DNA, 21 bp, Artificial Sequence
  n-mer motif encoding polynucleotide
gaggtggtgaagactactcat

SEQ ID NO: 6310 - DNA, 21 bp, Artificial Sequence
  n-mer motif encoding polynucleotide
gtttacgacaacgtttcttct

SEQ ID NO: 6311 - DNA, 21 bp, Artificial Sequence
  n-mer motif encoding polynucleotide
ctcatgaaagacatggaatcc

SEQ ID NO: 6312 - DNA, 21 bp, Artificial Sequence
  n-mer motif encoding polynucleotide
cctcttcatgttgcttctcct

SEQ ID NO: 6313 - DNA, 21 bp, Artificial Sequence
  n-mer motif encoding polynucleotide
gaagtacgcgaccaaaaaaca

SEQ ID NO: 6314 - DNA, 21 bp, Artificial Sequence
  n-mer motif encoding polynucleotide
ccaactccctactacaccgcc

SEQ ID NO: 6315 - DNA, 21 bp, Artificial Sequence
  n-mer motif encoding polynucleotide
aacaactacgcctactccgct

SEQ ID NO: 6316 - DNA, 21 bp, Artificial Sequence
  n-mer motif encoding polynucleotide
cttgttgatacggataggaat

SEQ ID NO: 6317 - DNA, 21 bp, Artificial Sequence
  n-mer motif encoding polynucleotide
tatccggctgatcatcggact

SEQ ID NO: 6318 - DNA, 21 bp, Artificial Sequence
  n-mer motif encoding polynucleotide
tctgcaacaacgaaccacgga

SEQ ID NO: 6319 - DNA, 21 bp, Artificial Sequence
  n-mer motif encoding polynucleotide
cgtgatgatcagcagcttgat

SEQ ID NO: 6320 - DNA, 21 bp, Artificial Sequence
  n-mer motif encoding polynucleotide
ggagcgggacaatctcacgtg

SEQ ID NO: 6321 - DNA, 21 bp, Artificial Sequence
  n-mer motif encoding polynucleotide
gataggacttatcatgaggtg

SEQ ID NO: 6322 - DNA, 21 bp, Artificial Sequence
  n-mer motif encoding polynucleotide
gatggtaataatacgacttat

SEQ ID NO: 6323 - DNA, 21 bp, Artificial Sequence
  n-mer motif encoding polynucleotide
gtgcatatggagtcgtatgcg

SEQ ID NO: 6324 - DNA, 21 bp, Artificial Sequence
  n-mer motif encoding polynucleotide
tggtacgaaacaatcagcccg

SEQ ID NO: 6325 - DNA, 21 bp, Artificial Sequence
  n-mer motif encoding polynucleotide
ctgttgggggctcatcagccg

SEQ ID NO: 6326 - DNA, 21 bp, Artificial Sequence
  n-mer motif encoding polynucleotide
cacgtacctaacactgaagca

SEQ ID NO: 6327 - DNA, 21 bp, Artificial Sequence
  n-mer motif encoding polynucleotide
aattctcagaatcctcagggt

SEQ ID NO: 6328 - DNA, 21 bp, Artificial Sequence
  n-mer motif encoding polynucleotide
ctacaagaccgggcaacgaac

SEQ ID NO: 6329 - DNA, 21 bp, Artificial Sequence
  n-mer motif encoding polynucleotide
attgtgaatcagcattcggag

SEQ ID NO: 6330 - DNA, 21 bp, Artificial Sequence
  n-mer motif encoding polynucleotide
tttgagcagggtaaggttgag

SEQ ID NO: 6331 - DNA, 21 bp, Artificial Sequence
  n-mer motif encoding polynucleotide
gtggcgacgggtgtgtttgct

SEQ ID NO: 6332 - DNA, 21 bp, Artificial Sequence
  n-mer motif encoding polynucleotide
gacaaaatacaaaacgaaaca

SEQ ID NO: 6333 - DNA, 21 bp, Artificial Sequence
  n-mer motif encoding polynucleotide
acggacaacccgtcctacaaa

SEQ ID NO: 6334 - DNA, 21 bp, Artificial Sequence
  n-mer motif encoding polynucleotide
ggcgtgaacacaaaaatcgaa

SEQ ID NO: 6335 - DNA, 21 bp, Artificial Sequence
  n-mer motif encoding polynucleotide
ggctctcacaacggcccagcc

SEQ ID NO: 6336 - DNA, 21 bp, Artificial Sequence
  n-mer motif encoding polynucleotide
tccaacatgggcgtagcctct

SEQ ID NO: 6337 - DNA, 21 bp, Artificial Sequence
  n-mer motif encoding polynucleotide
aacacggacactaacgaaaaa

SEQ ID NO: 6338 - DNA, 21 bp, Artificial Sequence
  n-mer motif encoding polynucleotide
tctgcgcttttgcggatggat

SEQ ID NO: 6339 - DNA, 21 bp, Artificial Sequence
  n-mer motif encoding polynucleotide
cctcaactaagcggcacagcg

SEQ ID NO: 6340 - DNA, 21 bp, Artificial Sequence
  n-mer motif encoding polynucleotide
tctattgttaataatggggct

SEQ ID NO: 6341 - DNA, 21 bp, Artificial Sequence
  n-mer motif encoding polynucleotide
agcctagaccacgcccctcta

SEQ ID NO: 6342 - DNA, 21 bp, Artificial Sequence
  n-mer motif encoding polynucleotide
gaccactcgaaacaaaactct

SEQ ID NO: 6343 - DNA, 21 bp, Artificial Sequence
  n-mer motif encoding polynucleotide
cacagtgacatggtcagcggc

SEQ ID NO: 6344 - DNA, 21 bp, Artificial Sequence
  n-mer motif encoding polynucleotide
cagcatcgtgcgcaggatgtg

SEQ ID NO: 6345 - DNA, 21 bp, Artificial Sequence
  n-mer motif encoding polynucleotide
ggtagtactaagtctgggcag

SEQ ID NO: 6346 - DNA, 21 bp, Artificial Sequence
  n-mer motif encoding polynucleotide
acaatgagcgtaactctggaa

SEQ ID NO: 6347 - DNA, 21 bp, Artificial Sequence
  n-mer motif encoding polynucleotide
tataataatggtgggcatgtt

SEQ ID NO: 6348 - DNA, 21 bp, Artificial Sequence
  n-mer motif encoding polynucleotide
ggtactgctgagaatacgagt

SEQ ID NO: 6349 - DNA, 21 bp, Artificial Sequence
  n-mer motif encoding polynucleotide
aatagttatgatgcgacgagg

SEQ ID NO: 6350 - DNA, 21 bp, Artificial Sequence
  n-mer motif encoding polynucleotide
agcgtcaacaacatgcgactc

SEQ ID NO: 6351 - DNA, 21 bp, Artificial Sequence
  n-mer motif encoding polynucleotide
cttaacttacaatacactctg

SEQ ID NO: 6352 - DNA, 21 bp, Artificial Sequence
  n-mer motif encoding polynucleotide
gaggcgcagaccggctgggtt

SEQ ID NO: 6353 - DNA, 21 bp, Artificial Sequence
  n-mer motif encoding polynucleotide
cccgctgaaggaaacaaccgt

SEQ ID NO: 6354 - DNA, 21 bp, Artificial Sequence
  n-mer motif encoding polynucleotide
tctctgggtgggaatccgcct

SEQ ID NO: 6355 - DNA, 21 bp, Artificial Sequence
  n-mer motif encoding polynucleotide
tataatagggataatggttct

SEQ ID NO: 6356 - DNA, 21 bp, Artificial Sequence
  n-mer motif encoding polynucleotide
ttgactgatcctaaggggcag

SEQ ID NO: 6357 - DNA, 21 bp, Artificial Sequence
  n-mer motif encoding polynucleotide
accccaacaggcaccaacaaa

SEQ ID NO: 6358 - DNA, 21 bp, Artificial Sequence
  n-mer motif encoding polynucleotide
gttcacgctaacgctacatta

SEQ ID NO: 6359 - DNA, 21 bp, Artificial Sequence
  n-mer motif encoding polynucleotide
cgcgaaatagtgcactcaaac

SEQ ID NO: 6360 - DNA, 21 bp, Artificial Sequence
  n-mer motif encoding polynucleotide
tacgccgtcgcgataggcaca

SEQ ID NO: 6361 - DNA, 21 bp, Artificial Sequence
  n-mer motif encoding polynucleotide
aacacaacacctcccgaccac

SEQ ID NO: 6362 - DNA, 21 bp, Artificial Sequence
  n-mer motif encoding polynucleotide
gttattcagtctgataatacg

SEQ ID NO: 6363 - DNA, 21 bp, Artificial Sequence
  n-mer motif encoding polynucleotide
gttccggcgcattctcggggt

SEQ ID NO: 6364 - DNA, 21 bp, Artificial Sequence
  n-mer motif encoding polynucleotide
caaaacagtgacctcgccagc

SEQ ID NO: 6365 - DNA, 21 bp, Artificial Sequence
  n-mer motif encoding polynucleotide
cgcatcgtagacacgttggga

SEQ ID NO: 6366 - DNA, 21 bp, Artificial Sequence
  n-mer motif encoding polynucleotide
cacacttactcacaagcagac

SEQ ID NO: 6367 - DNA, 21 bp, Artificial Sequence
  n-mer motif encoding polynucleotide
acggctccatccgtagggtct

SEQ ID NO: 6368 - DNA, 21 bp, Artificial Sequence
  n-mer motif encoding polynucleotide
aacgtgggcaccgacagagac

SEQ ID NO: 6369 - DNA, 21 bp, Artificial Sequence
  n-mer motif encoding polynucleotide
gggattaatcgtactagtgag

SEQ ID NO: 6370 - DNA, 21 bp, Artificial Sequence
  n-mer motif encoding polynucleotide
gtagaaacagacagcttaata

SEQ ID NO: 6371 - DNA, 21 bp, Artificial Sequence
  n-mer motif encoding polynucleotide
cactccgcagcgggtgacggt

SEQ ID NO: 6372 - DNA, 21 bp, Artificial Sequence
  n-mer motif encoding polynucleotide
gatgctgggattagttcttat

SEQ ID NO: 6373 - DNA, 21 bp, Artificial Sequence
  n-mer motif encoding polynucleotide
tgcaccgccacaaaatgctca

SEQ ID NO: 6374 - DNA, 21 bp, Artificial Sequence
  n-mer motif encoding polynucleotide
cgcatagacactctcctagtc

SEQ ID NO: 6375 - DNA, 21 bp, Artificial Sequence
  n-mer motif encoding polynucleotide
gtatcacaatcacacgacgtg

SEQ ID NO: 6376 - DNA, 21 bp, Artificial Sequence
  n-mer motif encoding polynucleotide
gcactaccatcccactcctcc

SEQ ID NO: 6377 - DNA, 21 bp, Artificial Sequence
  n-mer motif encoding polynucleotide
gggaaacctgcggaagcgccg

SEQ ID NO: 6378 - DNA, 21 bp, Artificial Sequence
  n-mer motif encoding polynucleotide
tggaatagtccgggtgaggcg

SEQ ID NO: 6379 - DNA, 21 bp, Artificial Sequence
  n-mer motif encoding polynucleotide
aggctggagcgtccggattat

SEQ ID NO: 6380 - DNA, 21 bp, Artificial Sequence
  n-mer motif encoding polynucleotide
acgcgggagagtctggtggat

SEQ ID NO: 6381 - DNA, 21 bp, Artificial Sequence
  n-mer motif encoding polynucleotide
agacacgaaggtccgtactcc

SEQ ID NO: 6382 - DNA, 21 bp, Artificial Sequence
  n-mer motif encoding polynucleotide
gttttgtctgataaggcgttt

SEQ ID NO: 6383 - DNA, 21 bp, Artificial Sequence
  n-mer motif encoding polynucleotide
actagtgcgactgattcgatg

SEQ ID NO: 6384 - DNA, 21 bp, Artificial Sequence
  n-mer motif encoding polynucleotide
actgagccgcttccgatgtct

SEQ ID NO: 6385 - DNA, 21 bp, Artificial Sequence
  n-mer motif encoding polynucleotide
atgccttacgtcgggacagta

SEQ ID NO: 6386 - DNA, 21 bp, Artificial Sequence
  n-mer motif encoding polynucleotide
cgtgattattctcctactgat

SEQ ID NO: 6387 - DNA, 21 bp, Artificial Sequence
  n-mer motif encoding polynucleotide
cggaatggtggtactacggat

SEQ ID NO: 6388 - DNA, 21 bp, Artificial Sequence
  n-mer motif encoding polynucleotide
atgatgggcgcgacaacgaaa

SEQ ID NO: 6389 - DNA, 21 bp, Artificial Sequence
  n-mer motif encoding polynucleotide
gctgccgttggcggagacacc

SEQ ID NO: 6390 - DNA, 21 bp, Artificial Sequence
  n-mer motif encoding polynucleotide
cttgtgaataatgatgggact

SEQ ID NO: 6391 - DNA, 21 bp, Artificial Sequence
  n-mer motif encoding polynucleotide
agttcgactccgcaggatact

SEQ ID NO: 6392 - DNA, 21 bp, Artificial Sequence
  n-mer motif encoding polynucleotide
agtctgcggatggagaatagt

SEQ ID NO: 6393 - DNA, 21 bp, Artificial Sequence
  n-mer motif encoding polynucleotide
gtgcaggggcagaccggctgg

SEQ ID NO: 6394 - DNA, 21 bp, Artificial Sequence
  n-mer motif encoding polynucleotide
ctaggtttcacaccccaaccg

SEQ ID NO: 6395 - DNA, 21 bp, Artificial Sequence
  n-mer motif encoding polynucleotide
tcggttgctaaggatcagacg

SEQ ID NO: 6396 - DNA, 21 bp, Artificial Sequence
  n-mer motif encoding polynucleotide
ccgcggcatgagttgagtaat

SEQ ID NO: 6397 - DNA, 21 bp, Artificial Sequence
  n-mer motif encoding polynucleotide
aaaatgggatcgaaccccgca

SEQ ID NO: 6398 - DNA, 21 bp, Artificial Sequence
  n-mer motif encoding polynucleotide
gaggcgactcatggttcttat

SEQ ID NO: 6399 - DNA, 21 bp, Artificial Sequence
  n-mer motif encoding polynucleotide
cctgaggttgcgtgtcctggg

SEQ ID NO: 6400 - DNA, 21 bp, Artificial Sequence
  n-mer motif encoding polynucleotide
gtgaatacgcgggaggttacg

SEQ ID NO: 6401 - DNA, 21 bp, Artificial Sequence
  n-mer motif encoding polynucleotide
acggctcgtgcgattgatatg

SEQ ID NO: 6402 - DNA, 21 bp, Artificial Sequence
  n-mer motif encoding polynucleotide
accgacggcgccctgggttac

SEQ ID NO: 6403 - DNA, 21 bp, Artificial Sequence
  n-mer motif encoding polynucleotide
gggtcgcaatacgcgaaccgc

SEQ ID NO: 6404 - DNA, 21 bp, Artificial Sequence
  n-mer motif encoding polynucleotide
gaaatgggtaaccaataccca

SEQ ID NO: 6405 - DNA, 21 bp, Artificial Sequence
  n-mer motif encoding polynucleotide
ccgtcgacactcgctgaaaca

SEQ ID NO: 6406 - DNA, 21 bp, Artificial Sequence
  n-mer motif encoding polynucleotide
cgcataggcgttggagcacca

SEQ ID NO: 6407 - DNA, 21 bp, Artificial Sequence
  n-mer motif encoding polynucleotide
ctgagtgtgaaggaggagatt

SEQ ID NO: 6408 - DNA, 21 bp, Artificial Sequence
  n-mer motif encoding polynucleotide
tatactactcatgagagtggg

SEQ ID NO: 6409 - DNA, 21 bp, Artificial Sequence
  n-mer motif encoding polynucleotide
cttactgctgttctgactgtt

SEQ ID NO: 6410 - DNA, 21 bp, Artificial Sequence
  n-mer motif encoding polynucleotide
ctgcagacttctgttgctact

SEQ ID NO: 6411 - DNA, 21 bp, Artificial Sequence
  n-mer motif encoding polynucleotide
actgtgcgttcgcctcagccg

SEQ ID NO: 6412 - DNA, 21 bp, Artificial Sequence
  n-mer motif encoding polynucleotide
catcctgatggtactcggccg

SEQ ID NO: 6413 - DNA, 21 bp, Artificial Sequence
  n-mer motif encoding polynucleotide
ggagtaacaatcggtagcagg

SEQ ID NO: 6414 - DNA, 21 bp, Artificial Sequence
  n-mer motif encoding polynucleotide
acatacgcctctactgaagcg

SEQ ID NO: 6415 - DNA, 21 bp, Artificial Sequence
  n-mer motif encoding polynucleotide
aggagtagtcctgcgacgaat

SEQ ID NO: 6416 - DNA, 21 bp, Artificial Sequence
  n-mer motif encoding polynucleotide
atcgggtcgccgttggccaac

SEQ ID NO: 6417 - DNA, 21 bp, Artificial Sequence
  n-mer motif encoding polynucleotide
gcgtcgactgagtctcatgtg

SEQ ID NO: 6418 - DNA, 21 bp, Artificial Sequence
  n-mer motif encoding polynucleotide
attgcgcagaatgagacgtat

SEQ ID NO: 6419 - DNA, 21 bp, Artificial Sequence
  n-mer motif encoding polynucleotide
atggagtctaagccgtggcag

SEQ ID NO: 6420 - DNA, 21 bp, Artificial Sequence
  n-mer motif encoding polynucleotide
ttagaaaacccaacaccagca

SEQ ID NO: 6421 - DNA, 21 bp, Artificial Sequence
  n-mer motif encoding polynucleotide
cccaaccccagtccaagacaa

SEQ ID NO: 6422 - DNA, 21 bp, Artificial Sequence
  n-mer motif encoding polynucleotide
tcgactagtaatccgccttat

SEQ ID NO: 6423 - DNA, 21 bp, Artificial Sequence
  n-mer motif encoding polynucleotide
tatttgacggatactcctact

SEQ ID NO: 6424 - DNA, 21 bp, Artificial Sequence
  n-mer motif encoding polynucleotide
atacgtgcattgatgacggac

SEQ ID NO: 6425 - DNA, 21 bp, Artificial Sequence
  n-mer motif encoding polynucleotide
cctatgggtacggatacggtt

SEQ ID NO: 6426 - DNA, 21 bp, Artificial Sequence
  n-mer motif encoding polynucleotide
acgaggactcaggggacgtct

SEQ ID NO: 6427 - DNA, 21 bp, Artificial Sequence
  n-mer motif encoding polynucleotide
tctaataatatgaatcaggcg

SEQ ID NO: 6428 - DNA, 21 bp, Artificial Sequence
  n-mer motif encoding polynucleotide
gaagactctgtaaaccacatc

SEQ ID NO: 6429 - DNA, 21 bp, Artificial Sequence
  n-mer motif encoding polynucleotide
tctgttgtgcctacggataag

SEQ ID NO: 6430 - DNA, 21 bp, Artificial Sequence
  n-mer motif encoding polynucleotide
gtgcgcggcgttcaagacgcc

SEQ ID NO: 6431 - DNA, 21 bp, Artificial Sequence
  n-mer motif encoding polynucleotide
catgatgtgactgtgcggaat

SEQ ID NO: 6432 - DNA, 21 bp, Artificial Sequence
  n-mer motif encoding polynucleotide
cataataatcatgcgggtgag

SEQ ID NO: 6433 - DNA, 21 bp, Artificial Sequence
  n-mer motif encoding polynucleotide
ggtaatatgaatcatagtatt

SEQ ID NO: 6434 - DNA, 21 bp, Artificial Sequence
  n-mer motif encoding polynucleotide
ggtgtgcatactcatactgtt

SEQ ID NO: 6435 - DNA, 21 bp, Artificial Sequence
  n-mer motif encoding polynucleotide
tttttgccgcagctggggcag

SEQ ID NO: 6436 - DNA, 21 bp, Artificial Sequence
  n-mer motif encoding polynucleotide
ttggccaacatgtccgcacca

SEQ ID NO: 6437 - DNA, 21 bp, Artificial Sequence
  n-mer motif encoding polynucleotide
gttcgcagagacgaaacacct

SEQ ID NO: 6438 - DNA, 21 bp, Artificial Sequence
  n-mer motif encoding polynucleotide
tgccgcgacaacgtcttagct

SEQ ID NO: 6439 - DNA, 21 bp, Artificial Sequence
  n-mer motif encoding polynucleotide
atgttggcttctcgggtgcct

SEQ ID NO: 6440 - DNA, 21 bp, Artificial Sequence
  n-mer motif encoding polynucleotide
gtcagaacagtccttcaacaa

SEQ ID NO: 6441 - DNA, 21 bp, Artificial Sequence
  n-mer motif encoding polynucleotide
tcgaatcagaatgtggattgg

SEQ ID NO: 6442 - DNA, 21 bp, Artificial Sequence
  n-mer motif encoding polynucleotide
actgaggttacgggggatagt

SEQ ID NO: 6443 - DNA, 21 bp, Artificial Sequence
  n-mer motif encoding polynucleotide
gaaagtgccacatctctaaaa

SEQ ID NO: 6444 - DNA, 21 bp, Artificial Sequence
  n-mer motif encoding polynucleotide
aaccaccccgcaccaagctca

SEQ ID NO: 6445 - DNA, 21 bp, Artificial Sequence
  n-mer motif encoding polynucleotide
tacggtaacgcgaacaccgta

SEQ ID NO: 6446 - DNA, 21 bp, Artificial Sequence
  n-mer motif encoding polynucleotide
caaaacgacaaatctgacaac

SEQ ID NO: 6447 - DNA, 21 bp, Artificial Sequence
  n-mer motif encoding polynucleotide
agtcaggctcagattcgtgtt

SEQ ID NO: 6448 - DNA, 21 bp, Artificial Sequence
  n-mer motif encoding polynucleotide
tttcagcgtgatgttggtcat

SEQ ID NO: 6449 - DNA, 21 bp, Artificial Sequence
  n-mer motif encoding polynucleotide
ctgatgaatcgtaatgctcct

SEQ ID NO: 6450 - DNA, 21 bp, Artificial Sequence
  n-mer motif encoding polynucleotide
gcgggcagttcgccatcacgc

SEQ ID NO: 6451 - DNA, 21 bp, Artificial Sequence
  n-mer motif encoding polynucleotide
ttattccacagccaaatgacc

SEQ ID NO: 6452 - DNA, 21 bp, Artificial Sequence
  n-mer motif encoding polynucleotide
atgatgtctaacagcctcgcg

SEQ ID NO: 6453 - DNA, 21 bp, Artificial Sequence
  n-mer motif encoding polynucleotide
gttaccaccgtcctccaatca

SEQ ID NO: 6454 - DNA, 21 bp, Artificial Sequence
  n-mer motif encoding polynucleotide
ggtagtcagcgtgctatgaat

SEQ ID NO: 6455 - DNA, 21 bp, Artificial Sequence
  n-mer motif encoding polynucleotide
gcatccggcgcacgctacgtc

SEQ ID NO: 6456 - DNA, 21 bp, Artificial Sequence
  n-mer motif encoding polynucleotide
aaaaactacgacagtgactca

SEQ ID NO: 6457 - DNA, 21 bp, Artificial Sequence
  n-mer motif encoding polynucleotide
gtgggttctggggttggggtt

SEQ ID NO: 6458 - DNA, 21 bp, Artificial Sequence
  n-mer motif encoding polynucleotide
cgttctgaccttactgaaagt

SEQ ID NO: 6459 - DNA, 21 bp, Artificial Sequence
  n-mer motif encoding polynucleotide
agggcggagtttattgatacg

SEQ ID NO: 6460 - DNA, 21 bp, Artificial Sequence
  n-mer motif encoding polynucleotide
acatctgaaatgcggacagcc

SEQ ID NO: 6461 - DNA, 21 bp, Artificial Sequence
  n-mer motif encoding polynucleotide
gagttggatcatctttcgcat

SEQ ID NO: 6462 - DNA, 21 bp, Artificial Sequence
  n-mer motif encoding polynucleotide
acacaagcaggtcttgcgtca

SEQ ID NO: 6463 - DNA, 21 bp, Artificial Sequence
  n-mer motif encoding polynucleotide
gcggctcagcatcatgatacg

SEQ ID NO: 6464 - DNA, 21 bp, Artificial Sequence
  n-mer motif encoding polynucleotide
ggcggcgcacacactcgtgta

SEQ ID NO: 6465 - DNA, 21 bp, Artificial Sequence
  n-mer motif encoding polynucleotide
gcctacggtatacacgaagtg

SEQ ID NO: 6466 - DNA, 21 bp, Artificial Sequence
  n-mer motif encoding polynucleotide
gcgatgctgcgtatggagcag

SEQ ID NO: 6467 - DNA, 21 bp, Artificial Sequence
  n-mer motif encoding polynucleotide
acggatcgttcgcggctgggg

SEQ ID NO: 6468 - DNA, 21 bp, Artificial Sequence
  n-mer motif encoding polynucleotide
gagagggagcctcctaagaat

SEQ ID NO: 6469 - DNA, 21 bp, Artificial Sequence
  n-mer motif encoding polynucleotide
gttgttaaggagattaagctg

SEQ ID NO: 6470 - DNA, 21 bp, Artificial Sequence
  n-mer motif encoding polynucleotide
cacaccggccaaacaccatca

SEQ ID NO: 6471 - DNA, 21 bp, Artificial Sequence
  n-mer motif encoding polynucleotide
gtgtctctgagttcgcctccg

SEQ ID NO: 6472 - DNA, 21 bp, Artificial Sequence
  n-mer motif encoding polynucleotide
ggggcaggaaacctgggtacc

SEQ ID NO: 6473 - DNA, 21 bp, Artificial Sequence
  n-mer motif encoding polynucleotide
gcacgagacgacacgatacaa

SEQ ID NO: 6474 - DNA, 21 bp, Artificial Sequence
  n-mer motif encoding polynucleotide
gggacttatactaatatgccg

SEQ ID NO: 6475 - DNA, 21 bp, Artificial Sequence
  n-mer motif encoding polynucleotide
atgctggggggttttgcgcag

SEQ ID NO: 6476 - DNA, 21 bp, Artificial Sequence
  n-mer motif encoding polynucleotide
ccatccgaaatgagggccgta

SEQ ID NO: 6477 - DNA, 21 bp, Artificial Sequence
  n-mer motif encoding polynucleotide
cgtataagcccagaaaactca

SEQ ID NO: 6478 - DNA, 21 bp, Artificial Sequence
  n-mer motif encoding polynucleotide
aagatgggtggttctcagagt

SEQ ID NO: 6479 - DNA, 21 bp, Artificial Sequence
  n-mer motif encoding polynucleotide
ggtttgatggcgcatgtgact

SEQ ID NO: 6480 - DNA, 21 bp, Artificial Sequence
  n-mer motif encoding polynucleotide
tcacgtcaaacagcgctaaca

SEQ ID NO: 6481 - DNA, 21 bp, Artificial Sequence
  n-mer motif encoding polynucleotide
agtgatctgaatcttccgccg

SEQ ID NO: 6482 - DNA, 21 bp, Artificial Sequence
  n-mer motif encoding polynucleotide
tatgtgtctgattatttgcat

SEQ ID NO: 6483 - DNA, 21 bp, Artificial Sequence
  n-mer motif encoding polynucleotide
actaatgataatagtgatcgt

SEQ ID NO: 6484 - DNA, 21 bp, Artificial Sequence
  n-mer motif encoding polynucleotide
tacttaatgcacgacagcgca

SEQ ID NO: 6485 - DNA, 21 bp, Artificial Sequence
  n-mer motif encoding polynucleotide
ggctctcggaacggacccaca

SEQ ID NO: 6486 - DNA, 21 bp, Artificial Sequence
  n-mer motif encoding polynucleotide
aaaaacggtgttataaacgac

SEQ ID NO: 6487 - DNA, 21 bp, Artificial Sequence
  n-mer motif encoding polynucleotide
gagtctgttgctaatcttaag

SEQ ID NO: 6488 - DNA, 21 bp, Artificial Sequence
  n-mer motif encoding polynucleotide
gcatcggactcgacgacacca

SEQ ID NO: 6489 - DNA, 21 bp, Artificial Sequence
  n-mer motif encoding polynucleotide
ctgaacgttagttcatccaaa

SEQ ID NO: 6490 - DNA, 21 bp, Artificial Sequence
  n-mer motif encoding polynucleotide
gaggctaagggttttggtcat

SEQ ID NO: 6491 - DNA, 21 bp, Artificial Sequence
  n-mer motif encoding polynucleotide
ggtacgagtgcggagagtcgg

SEQ ID NO: 6492 - DNA, 21 bp, Artificial Sequence
  n-mer motif encoding polynucleotide
atgcacaacctaccctcatac

SEQ ID NO: 6493 - DNA, 21 bp, Artificial Sequence
  n-mer motif encoding polynucleotide
gtcttcacagaaatagaatcg

SEQ ID NO: 6494 - DNA, 21 bp, Artificial Sequence
  n-mer motif encoding polynucleotide
actcaaacttctacctggacc

SEQ ID NO: 6495 - DNA, 21 bp, Artificial Sequence
  n-mer motif encoding polynucleotide
cctatgaataaggatattttg

SEQ ID NO: 6496 - DNA, 21 bp, Artificial Sequence
  n-mer motif encoding polynucleotide
aaagaatctgaatacagagtt

SEQ ID NO: 6497 - DNA, 21 bp, Artificial Sequence
  n-mer motif encoding polynucleotide
tcgacgaattctgaggcggtt

SEQ ID NO: 6498 - DNA, 21 bp, Artificial Sequence
  n-mer motif encoding polynucleotide
gatacggcgaatcgttcgact

SEQ ID NO: 6499 - DNA, 21 bp, Artificial Sequence
  n-mer motif encoding polynucleotide
cctaaggctccgcttaataat

SEQ ID NO: 6500 - DNA, 21 bp, Artificial Sequence
  n-mer motif encoding polynucleotide
ttagctacatacccctcccac

SEQ ID NO: 6501 - DNA, 21 bp, Artificial Sequence
  n-mer motif encoding polynucleotide
gctacggttcagtcggttgat

SEQ ID NO: 6502 - DNA, 21 bp, Artificial Sequence
  n-mer motif encoding polynucleotide
aattcgatgggtaatgggggt

SEQ ID NO: 6503 - DNA, 21 bp, Artificial Sequence
  n-mer motif encoding polynucleotide
gatcatagtgagcagaattcg

SEQ ID NO: 6504 - DNA, 21 bp, Artificial Sequence
  n-mer motif encoding polynucleotide
acttttttgcctcagcttggg

SEQ ID NO: 6505 - DNA, 21 bp, Artificial Sequence
  n-mer motif encoding polynucleotide
gggtttactaatacgagtaag

SEQ ID NO: 6506 - DNA, 21 bp, Artificial Sequence
  n-mer motif encoding polynucleotide
acgatgaattatagtcatact

SEQ ID NO: 6507 - DNA, 21 bp, Artificial Sequence
  n-mer motif encoding polynucleotide
agtatcggattctcagtaggc

SEQ ID NO: 6508 - DNA, 21 bp, Artificial Sequence
  n-mer motif encoding polynucleotide
agtgagaatcgggctggtaat

SEQ ID NO: 6509 - DNA, 21 bp, Artificial Sequence
  n-mer motif encoding polynucleotide
agtcttaatctgcatagtgtg

SEQ ID NO: 6510 - DNA, 21 bp, Artificial Sequence
  n-mer motif encoding polynucleotide
catgagagtcattatgttagt

SEQ ID NO: 6511 - DNA, 21 bp, Artificial Sequence
  n-mer motif encoding polynucleotide
aatgttgttaatgggatggat

SEQ ID NO: 6512 - DNA, 21 bp, Artificial Sequence
  n-mer motif encoding polynucleotide
cactccgacaaagtctcctca

SEQ ID NO: 6513 - DNA, 21 bp, Artificial Sequence
  n-mer motif encoding polynucleotide
aaatctgtaggcgacgggaga

SEQ ID NO: 6514 - DNA, 21 bp, Artificial Sequence
  n-mer motif encoding polynucleotide
aggcaggttgagcagtctgat

SEQ ID NO: 6515 - DNA, 21 bp, Artificial Sequence
  n-mer motif encoding polynucleotide
agggagctggtgaatacggat

SEQ ID NO: 6516 - DNA, 21 bp, Artificial Sequence
  n-mer motif encoding polynucleotide
aactacagggacatcacaatg

SEQ ID NO: 6517 - DNA, 21 bp, Artificial Sequence
  n-mer motif encoding polynucleotide
gccagccttgaccgccttcca

SEQ ID NO: 6518 - DNA, 21 bp, Artificial Sequence
  n-mer motif encoding polynucleotide
agacaacttgcttctctccca

SEQ ID NO: 6519 - DNA, 21 bp, Artificial Sequence
  n-mer motif encoding polynucleotide
gtcagcaaaaccaaagactcg

SEQ ID NO: 6520 - DNA, 21 bp, Artificial Sequence
  n-mer motif encoding polynucleotide
aacgtatacgaagggcaccgc

SEQ ID NO: 6521 - DNA, 21 bp, Artificial Sequence
  n-mer motif encoding polynucleotide
ctagaacaactacgggtccca

SEQ ID NO: 6522 - DNA, 21 bp, Artificial Sequence
  n-mer motif encoding polynucleotide
atgacctacacatccccaacc

SEQ ID NO: 6523 - DNA, 21 bp, Artificial Sequence
  n-mer motif encoding polynucleotide
aactcccacaccgacagagga

SEQ ID NO: 6524 - DNA, 21 bp, Artificial Sequence
  n-mer motif encoding polynucleotide
gtggctggggggacttcggag

SEQ ID NO: 6525 - DNA, 21 bp, Artificial Sequence
  n-mer motif encoding polynucleotide
gtcgacgcacacagggctaac

SEQ ID NO: 6526 - DNA, 21 bp, Artificial Sequence
  n-mer motif encoding polynucleotide
cgggcagacatgactccctta

SEQ ID NO: 6527 - DNA, 21 bp, Artificial Sequence
  n-mer motif encoding polynucleotide
ggacacgaacaaactgacgca

SEQ ID NO: 6528 - DNA, 21 bp, Artificial Sequence
  n-mer motif encoding polynucleotide
tacatcgcgggaggcgaccaa

SEQ ID NO: 6529 - DNA, 21 bp, Artificial Sequence
  n-mer motif encoding polynucleotide
tacggcgacctaactacagtc

SEQ ID NO: 6530 - DNA, 21 bp, Artificial Sequence
  n-mer motif encoding polynucleotide
agattagacctgcaagaacac

SEQ ID NO: 6531 - DNA, 21 bp, Artificial Sequence
  n-mer motif encoding polynucleotide
caccttaacccggcggcccaa

SEQ ID NO: 6532 - DNA, 21 bp, Artificial Sequence
  n-mer motif encoding polynucleotide
ggggttaacgaacaaacaaac

SEQ ID NO: 6533 - DNA, 21 bp, Artificial Sequence
  n-mer motif encoding polynucleotide
cgtcggttgagtacggatctt

SEQ ID NO: 6534 - DNA, 21 bp, Artificial Sequence
  n-mer motif encoding polynucleotide
ggatccacaggcctacccccg

SEQ ID NO: 6535 - DNA, 21 bp, Artificial Sequence
  n-mer motif encoding polynucleotide
gacgacatggtcaaaaactca

SEQ ID NO: 6536 - DNA, 21 bp, Artificial Sequence
  n-mer motif encoding polynucleotide
gttatagacctagtcactcgc

SEQ ID NO: 6537 - DNA, 21 bp, Artificial Sequence
  n-mer motif encoding polynucleotide
ggaggccttaccaacggtcta

SEQ ID NO: 6538 - DNA, 21 bp, Artificial Sequence
  n-mer motif encoding polynucleotide
cgtatggaggagactgcttat

SEQ ID NO: 6539 - DNA, 21 bp, Artificial Sequence
  n-mer motif encoding polynucleotide
accgacatctccggttacgga

SEQ ID NO: 6540 - DNA, 21 bp, Artificial Sequence
  n-mer motif encoding polynucleotide
caggttaatcataatactagt

SEQ ID NO: 6541 - DNA, 21 bp, Artificial Sequence
  n-mer motif encoding polynucleotide
gcgactactgaggatgttcgt

SEQ ID NO: 6542 - DNA, 21 bp, Artificial Sequence
  n-mer motif encoding polynucleotide
tggagcatcaaaaaccaaaca

SEQ ID NO: 6543 - DNA, 21 bp, Artificial Sequence
  n-mer motif encoding polynucleotide
tcccctaccagcaacacaata

SEQ ID NO: 6544 - DNA, 21 bp, Artificial Sequence
  n-mer motif encoding polynucleotide
atgaaaaactctggattcgac

SEQ ID NO: 6545 - DNA, 21 bp, Artificial Sequence
  n-mer motif encoding polynucleotide
cttgttgctgagcgtttgccg

SEQ ID NO: 6546 - DNA, 21 bp, Artificial Sequence
  n-mer motif encoding polynucleotide
ggtgaaactaacttcccaact

SEQ ID NO: 6547 - DNA, 21 bp, Artificial Sequence
  n-mer motif encoding polynucleotide
aatggtaagctgggtacgact

SEQ ID NO: 6548 - DNA, 21 bp, Artificial Sequence
  n-mer motif encoding polynucleotide
aacttagtagcgtacacgaaa

SEQ ID NO: 6549 - DNA, 21 bp, Artificial Sequence
  n-mer motif encoding polynucleotide
tggcagcttacgacgagtcat

SEQ ID NO: 6550 - DNA, 21 bp, Artificial Sequence
  n-mer motif encoding polynucleotide
agtttggacctaggaggcaac

SEQ ID NO: 6551 - DNA, 21 bp, Artificial Sequence
  n-mer motif encoding polynucleotide
aacgaaagcaccaaagaatct

SEQ ID NO: 6552 - DNA, 21 bp, Artificial Sequence
  n-mer motif encoding polynucleotide
ggttttgatggtaagcagctt

SEQ ID NO: 6553 - DNA, 21 bp, Artificial Sequence
  n-mer motif encoding polynucleotide
catctgtatatttcggcggat

SEQ ID NO: 6554 - DNA, 21 bp, Artificial Sequence
  n-mer motif encoding polynucleotide
ttacttccaaacaacacccac

SEQ ID NO: 6555 - DNA, 21 bp, Artificial Sequence
  n-mer motif encoding polynucleotide
tccggaatggccggcctttcc

SEQ ID NO: 6556 - DNA, 21 bp, Artificial Sequence
  n-mer motif encoding polynucleotide
atcacctcactccccgaaacc

SEQ ID NO: 6557 - DNA, 21 bp, Artificial Sequence
  n-mer motif encoding polynucleotide
gagcttaaggagagtcagaag

SEQ ID NO: 6558 - DNA, 21 bp, Artificial Sequence
  n-mer motif encoding polynucleotide
aatattgtgcaggattatccg

SEQ ID NO: 6559 - DNA, 21 bp, Artificial Sequence
  n-mer motif encoding polynucleotide
tcagaaaacacctctgtaccc

SEQ ID NO: 6560 - DNA, 21 bp, Artificial Sequence
  n-mer motif encoding polynucleotide
gaccccaaccaacccaaaaca

SEQ ID NO: 6561 - DNA, 21 bp, Artificial Sequence
  n-mer motif encoding polynucleotide
gcgggtttggatgtgaatacg

SEQ ID NO: 6562 - DNA, 21 bp, Artificial Sequence
  n-mer motif encoding polynucleotide
tctcatgagatgaataatggt

SEQ ID NO: 6563 - DNA, 21 bp, Artificial Sequence
  n-mer motif encoding polynucleotide
tcttacgccataaaccaatca

SEQ ID NO: 6564 - DNA, 21 bp, Artificial Sequence
  n-mer motif encoding polynucleotide
ggtcatctgcctgcggctaag

SEQ ID NO: 6565 - DNA, 21 bp, Artificial Sequence
  n-mer motif encoding polynucleotide
gagttgggtaataagacggct

SEQ ID NO: 6566 - DNA, 21 bp, Artificial Sequence
  n-mer motif encoding polynucleotide
cttgagtctactcgtaaggct

SEQ ID NO: 6567 - DNA, 21 bp, Artificial Sequence
  n-mer motif encoding polynucleotide
actcaaggcaactctgaagca

SEQ ID NO: 6568 - DNA, 21 bp, Artificial Sequence
  n-mer motif encoding polynucleotide
atctctatagactccgctatg

SEQ ID NO: 6569 - DNA, 21 bp, Artificial Sequence
  n-mer motif encoding polynucleotide
gagtttcagaggattcgtgag

SEQ ID NO: 6570 - DNA, 21 bp, Artificial Sequence
  n-mer motif encoding polynucleotide
gctagtctctccgcaccagcc

SEQ ID NO: 6571 - DNA, 21 bp, Artificial Sequence
  n-mer motif encoding polynucleotide
gacagccaaatcacaagacta

SEQ ID NO: 6572 - DNA, 21 bp, Artificial Sequence
  n-mer motif encoding polynucleotide
ggccacgaaaacatgggcgtg

SEQ ID NO: 6573 - DNA, 21 bp, Artificial Sequence
  n-mer motif encoding polynucleotide
atgtcggcggggcatcctacg

SEQ ID NO: 6574 - DNA, 21 bp, Artificial Sequence
  n-mer motif encoding polynucleotide
cacgctccaagcggcgccata

SEQ ID NO: 6575 - DNA, 21 bp, Artificial Sequence
  n-mer motif encoding polynucleotide
acgactattactaattcggtt

SEQ ID NO: 6576 - DNA, 21 bp, Artificial Sequence
  n-mer motif encoding polynucleotide
cctcagcatcagcatgagcat

SEQ ID NO: 6577 - DNA, 21 bp, Artificial Sequence
  n-mer motif encoding polynucleotide
caatactcgatggacacgcgc

SEQ ID NO: 6578 - DNA, 21 bp, Artificial Sequence
  n-mer motif encoding polynucleotide
ctttatgaggttggtactcct

SEQ ID NO: 6579 - DNA, 21 bp, Artificial Sequence
  n-mer motif encoding polynucleotide
ggtgagactatgcgtcataat

SEQ ID NO: 6580 - DNA, 21 bp, Artificial Sequence
  n-mer motif encoding polynucleotide
atgacaataaccgtcgaaccg

SEQ ID NO: 6581 - DNA, 21 bp, Artificial Sequence
  n-mer motif encoding polynucleotide
gcgcagcatcctgagcgttcg

SEQ ID NO: 6582 - DNA, 21 bp, Artificial Sequence
  n-mer motif encoding polynucleotide
acgcatgttgctaagcctgat

SEQ ID NO: 6583 - DNA, 21 bp, Artificial Sequence
  n-mer motif encoding polynucleotide
atgactgctaacttggtggaa

SEQ ID NO: 6584 - DNA, 21 bp, Artificial Sequence
  n-mer motif encoding polynucleotide
aataggcagcgggattttgag

SEQ ID NO: 6585 - DNA, 21 bp, Artificial Sequence
  n-mer motif encoding polynucleotide
tcaaacagcgccgacgcgggg

SEQ ID NO: 6586 - DNA, 21 bp, Artificial Sequence
  n-mer motif encoding polynucleotide
ggtgagtatggtgcgtcggtt

SEQ ID NO: 6587 - DNA, 21 bp, Artificial Sequence
  n-mer motif encoding polynucleotide
gacggcatggtcaggtcgaca

SEQ ID NO: 6588 - DNA, 21 bp, Artificial Sequence
  n-mer motif encoding polynucleotide
aatggtcagctgctggctaat

SEQ ID NO: 6589 - DNA, 21 bp, Artificial Sequence
  n-mer motif encoding polynucleotide
tccgcggggatgacattggac

SEQ ID NO: 6590 - DNA, 21 bp, Artificial Sequence
  n-mer motif encoding polynucleotide
gatcatgtgcatctgacttat

SEQ ID NO: 6591 - DNA, 21 bp, Artificial Sequence
  n-mer motif encoding polynucleotide
acgacactaacgcaaacggac

SEQ ID NO: 6592 - DNA, 21 bp, Artificial Sequence
  n-mer motif encoding polynucleotide
gtgcagttggctgatgggcat

SEQ ID NO: 6593 - DNA, 21 bp, Artificial Sequence
  n-mer motif encoding polynucleotide
actgactcatctgcagactcc

SEQ ID NO: 6594 - DNA, 21 bp, Artificial Sequence
  n-mer motif encoding polynucleotide
gcgatgaatgtgcggagtgat

SEQ ID NO: 6595 - DNA, 21 bp, Artificial Sequence
  n-mer motif encoding polynucleotide
ggtgatatttcttatagggtt

SEQ ID NO: 6596 - DNA, 21 bp, Artificial Sequence
  n-mer motif encoding polynucleotide
atggggtatgttgatagtctg

SEQ ID NO: 6597 - DNA, 21 bp, Artificial Sequence
  n-mer motif encoding polynucleotide
ctttatttggcggcggcttcg

SEQ ID NO: 6598 - DNA, 21 bp, Artificial Sequence
  n-mer motif encoding polynucleotide
tcatccccagactcgtacaga

SEQ ID NO: 6599 - DNA, 21 bp, Artificial Sequence
  n-mer motif encoding polynucleotide
agttataatgtggatctgcat

SEQ ID NO: 6600 - DNA, 21 bp, Artificial Sequence
  n-mer motif encoding polynucleotide
caacacaccgcccaccccatg

SEQ ID NO: 6601 - DNA, 21 bp, Artificial Sequence
  n-mer motif encoding polynucleotide
gcagttatggctacacacccc

SEQ ID NO: 6602 - DNA, 21 bp, Artificial Sequence
  n-mer motif encoding polynucleotide
attagtccgagtgcttctaat

SEQ ID NO: 6603 - DNA, 21 bp, Artificial Sequence
  n-mer motif encoding polynucleotide
actttggataataatcattct

SEQ ID NO: 6604 - DNA, 21 bp, Artificial Sequence
  n-mer motif encoding polynucleotide
agtgggtcttatgtggcgacg

SEQ ID NO: 6605 - DNA, 21 bp, Artificial Sequence
  n-mer motif encoding polynucleotide
atggcggctccgccggagcat

SEQ ID NO: 6606 - DNA, 21 bp, Artificial Sequence
  n-mer motif encoding polynucleotide
cagactgcgtctggtgatact

SEQ ID NO: 6607 - DNA, 21 bp, Artificial Sequence
  n-mer motif encoding polynucleotide
gagtctaagactgtggttatt

SEQ ID NO: 6608 - DNA, 21 bp, Artificial Sequence
  n-mer motif encoding polynucleotide
acggtattaccacaatcagac

SEQ ID NO: 6609 - DNA, 21 bp, Artificial Sequence
  n-mer motif encoding polynucleotide
ccattaaacgcgaacggctcc

SEQ ID NO: 6610 - DNA, 21 bp, Artificial Sequence
  n-mer motif encoding polynucleotide
cccctgaacacaggattaacc

SEQ ID NO: 6611 - DNA, 21 bp, Artificial Sequence
  n-mer motif encoding polynucleotide
gccataacgataataggcact

SEQ ID NO: 6612 - DNA, 21 bp, Artificial Sequence
  n-mer motif encoding polynucleotide
aatcctagtgcgattagttat

SEQ ID NO: 6613 - DNA, 21 bp, Artificial Sequence
  n-mer motif encoding polynucleotide
acagaacacgaaaaatccact

SEQ ID NO: 6614 - DNA, 21 bp, Artificial Sequence
  n-mer motif encoding polynucleotide
gctgagagtcagctggcgtcg

SEQ ID NO: 6615 - DNA, 21 bp, Artificial Sequence
  n-mer motif encoding polynucleotide
gtgcttaagggtacgtttccg

SEQ ID NO: 6616 - DNA, 21 bp, Artificial Sequence
  n-mer motif encoding polynucleotide
tcgttcgccgaaataacgact

SEQ ID NO: 6617 - DNA, 21 bp, Artificial Sequence
  n-mer motif encoding polynucleotide
ccgttaaacggccgcgtaacc

SEQ ID NO: 6618 - DNA, 21 bp, Artificial Sequence
  n-mer motif encoding polynucleotide
tccgaacgcccccaatcgtca

SEQ ID NO: 6619 - DNA, 21 bp, Artificial Sequence
  n-mer motif encoding polynucleotide
gctcagcttcaggattcggtg

SEQ ID NO: 6620 - DNA, 21 bp, Artificial Sequence
  n-mer motif encoding polynucleotide
cccaaccgtgtaacagcaccc

SEQ ID NO: 6621 - DNA, 21 bp, Artificial Sequence
  n-mer motif encoding polynucleotide
gcgcttattgtttcgagtatg

SEQ ID NO: 6622 - DNA, 21 bp, Artificial Sequence
  n-mer motif encoding polynucleotide
gcgcatggtgcttttccggtt

SEQ ID NO: 6623 - DNA, 21 bp, Artificial Sequence
  n-mer motif encoding polynucleotide
gaggcttatcagactgagaag

SEQ ID NO: 6624 - DNA, 21 bp, Artificial Sequence
  n-mer motif encoding polynucleotide
gctgcggcttcgcctttggct

SEQ ID NO: 6625 - DNA, 21 bp, Artificial Sequence
  n-mer motif encoding polynucleotide
ccccaagccactctcaacaac

SEQ ID NO: 6626 - DNA, 21 bp, Artificial Sequence
  n-mer motif encoding polynucleotide
acgaggggtgatatggagttt

SEQ ID NO: 6627 - DNA, 21 bp, Artificial Sequence
  n-mer motif encoding polynucleotide
agcaacctaggcgaagcatct

SEQ ID NO: 6628 - DNA, 21 bp, Artificial Sequence
  n-mer motif encoding polynucleotide
ggaatcaccggaagccccggc

SEQ ID NO: 6629 - DNA, 21 bp, Artificial Sequence
  n-mer motif encoding polynucleotide
gggtttgagacgagtagtcct

SEQ ID NO: 6630 - DNA, 21 bp, Artificial Sequence
  n-mer motif encoding polynucleotide
cccgcgagaagcgacgccctt

SEQ ID NO: 6631 - DNA, 21 bp, Artificial Sequence
  n-mer motif encoding polynucleotide
catgctaattatgttgaggtg

SEQ ID NO: 6632 - DNA, 21 bp, Artificial Sequence
  n-mer motif encoding polynucleotide
gtgactcgtagtacgaaggag

SEQ ID NO: 6633 - DNA, 21 bp, Artificial Sequence
  n-mer motif encoding polynucleotide
gatgttgcgttgaggtcgaat

SEQ ID NO: 6634 - DNA, 21 bp, Artificial Sequence
  n-mer motif encoding polynucleotide
gagtctgatttgcgtcagcgg

SEQ ID NO: 6635 - DNA, 21 bp, Artificial Sequence
  n-mer motif encoding polynucleotide
ccgttactcgcagcgaacccg

SEQ ID NO: 6636 - DNA, 21 bp, Artificial Sequence
  n-mer motif encoding polynucleotide
ataaacgccgcgcacaggccc

SEQ ID NO: 6637 - DNA, 21 bp, Artificial Sequence
  n-mer motif encoding polynucleotide
gctcggagagacgtaaactcg

SEQ ID NO: 6638 - DNA, 21 bp, Artificial Sequence
  n-mer motif encoding polynucleotide
agtatggataaggtggagaag

SEQ ID NO: 6639 - DNA, 21 bp, Artificial Sequence
  n-mer motif encoding polynucleotide
aacgtcagcgcacgggaaaca

SEQ ID NO: 6640 - DNA, 21 bp, Artificial Sequence
  n-mer motif encoding polynucleotide
ctgacgacggctggtatgtgg

SEQ ID NO: 6641 - DNA, 21 bp, Artificial Sequence
  n-mer motif encoding polynucleotide
gcgcgggcagaaggggtcttc

SEQ ID NO: 6642 - DNA, 21 bp, Artificial Sequence
  n-mer motif encoding polynucleotide
ccgagtgatcatatgcggact

SEQ ID NO: 6643 - DNA, 21 bp, Artificial Sequence
  n-mer motif encoding polynucleotide
agtaggacggttattttgtcg

SEQ ID NO: 6644 - DNA, 21 bp, Artificial Sequence
  n-mer motif encoding polynucleotide
cagagtaatgctgctgagggt

SEQ ID NO: 6645 - DNA, 21 bp, Artificial Sequence
  n-mer motif encoding polynucleotide
tggaccgaaacggccgctcac

SEQ ID NO: 6646 - DNA, 21 bp, Artificial Sequence
  n-mer motif encoding polynucleotide
aaggagaatcagcttagtaag

SEQ ID NO: 6647 - protein, 7 aa, Artificial Sequence
  n-mer motif
RGDLSTP

SEQ ID NO: 6648 - protein, 7 aa, Artificial Sequence
  n-mer motif
RGDLSTP

SEQ ID NO: 6649 - protein, 7 aa, Artificial Sequence
  n-mer motif
RGDLTTP

SEQ ID NO: 6650 - protein, 7 aa, Artificial Sequence
  n-mer motif
RGDLNQY

SEQ ID NO: 6651 - protein, 7 aa, Artificial Sequence
  n-mer motif
RGDQLYH

SEQ ID NO: 6652 - protein, 7 aa, Artificial Sequence
  n-mer motif
RGDATEL

SEQ ID NO: 6653 - protein, 7 aa, Artificial Sequence
  n-mer motif
RGDTMSK

SEQ ID NO: 6654 - protein, 7 aa, Artificial Sequence
  n-mer motif
RGDLNQY

SEQ ID NO: 6655 - protein, 7 aa, Artificial Sequence
  n-mer motif
RGDLTTP

SEQ ID NO: 6656 - protein, 7 aa, Artificial Sequence
  n-mer motif
RGDMINT

SEQ ID NO: 6657 - protein, 7 aa, Artificial Sequence
  n-mer motif
RGDTMSK

SEQ ID NO: 6658 - protein, 7 aa, Artificial Sequence
  n-mer motif
RGDTMNY

SEQ ID NO: 6659 - protein, 7 aa, Artificial Sequence
  n-mer motif
RGDATEL

SEQ ID NO: 6660 - protein, 7 aa, Artificial Sequence
  n-mer motif
RLDLQVH

SEQ ID NO: 6661 - protein, 7 aa, Artificial Sequence
  n-mer motif
RGDVAAK

SEQ ID NO: 6662 - protein, 7 aa, Artificial Sequence
  n-mer motif
RGDLNDS

SEQ ID NO: 6663 - protein, 7 aa, Artificial Sequence
  n-mer motif
RGDLNDS

SEQ ID NO: 6664 - protein, 7 aa, Artificial Sequence
  n-mer motif
SYGNTHD

SEQ ID NO: 6665 - protein, 7 aa, Artificial Sequence
  n-mer motif
RLDLQVN

SEQ ID NO: 6666 - protein, 7 aa, Artificial Sequence
  n-mer motif
KAGQLVE

SEQ ID NO: 6667 - protein, 7 aa, Artificial Sequence
  n-mer motif
DQTASIV

SEQ ID NO: 6668 - protein, 7 aa, Artificial Sequence
  n-mer motif
YIAAGEQ

SEQ ID NO: 6669 - protein, 7 aa, Artificial Sequence
  n-mer motif
AVVLNSN

SEQ ID NO: 6670 - protein, 7 aa, Artificial Sequence
  n-mer motif
SKGNEQM

SEQ ID NO: 6671 - protein, 7 aa, Artificial Sequence
  n-mer motif
ANPNILD

SEQ ID NO: 6672 - protein, 7 aa, Artificial Sequence
  n-mer motif
HNKPNGD

SEQ ID NO: 6673 - protein, 7 aa, Artificial Sequence
  n-mer motif
DKTEMLQ

SEQ ID NO: 6674 - protein, 7 aa, Artificial Sequence
  n-mer motif
TEQSYSR

SEQ ID NO: 6675 - protein, 7 aa, Artificial Sequence
  n-mer motif
TVMMSTR

SEQ ID NO: 6676 - protein, 7 aa, Artificial Sequence
  n-mer motif
VSTYLLA

SEQ ID NO: 6677 - protein, 7 aa, Artificial Sequence
  n-mer motif
PNVTQSY

SEQ ID NO: 6678 - protein, 7 aa, Artificial Sequence
  n-mer motif
MSNLGYE

SEQ ID NO: 6679 - protein, 7 aa, Artificial Sequence
  n-mer motif
TMGANGT

SEQ ID NO: 6680 - protein, 7 aa, Artificial Sequence
  n-mer motif
NVNAQSR

SEQ ID NO: 6681 - protein, 7 aa, Artificial Sequence
  n-mer motif
DQNFERR

SEQ ID NO: 6682 - protein, 7 aa, Artificial Sequence
  n-mer motif
NTYTPGK

SEQ ID NO: 6683 - protein, 7 aa, Artificial Sequence
  n-mer motif
RGDMINT

SEQ ID NO: 6684 - protein, 7 aa, Artificial Sequence
  n-mer motif
AQFESGR

SEQ ID NO: 6685 - protein, 7 aa, Artificial Sequence
  n-mer motif
TAYQAGL

SEQ ID NO: 6686 - protein, 7 aa, Artificial Sequence
  n-mer motif
SVSSVVL

SEQ ID NO: 6687 - protein, 7 aa, Artificial Sequence
  n-mer motif
GLSKASD

SEQ ID NO: 6688 - protein, 7 aa, Artificial Sequence
  n-mer motif
WNGNATQ

SEQ ID NO: 6689 - protein, 7 aa, Artificial Sequence
  n-mer motif
TAGGERA

SEQ ID NO: 6690 - protein, 7 aa, Artificial Sequence
  n-mer motif
YTSQTST

SEQ ID NO: 6691 - protein, 7 aa, Artificial Sequence
  n-mer motif
ANIENTS

SEQ ID NO: 6692 - protein, 7 aa, Artificial Sequence
  n-mer motif
ELSVPKP

SEQ ID NO: 6693 - protein, 7 aa, Artificial Sequence
  n-mer motif
DPGRTGT

SEQ ID NO: 6694 - protein, 7 aa, Artificial Sequence
  n-mer motif
DRPNNMT

SEQ ID NO: 6695 - protein, 7 aa, Artificial Sequence
  n-mer motif
YSTDLRM

SEQ ID NO: 6696 - protein, 7 aa, Artificial Sequence
  n-mer motif
QSVNSTS

SEQ ID NO: 6697 - protein, 7 aa, Artificial Sequence
  n-mer motif
AAQLVSP

SEQ ID NO: 6698 - protein, 7 aa, Artificial Sequence
  n-mer motif
LGGNSRF

SEQ ID NO: 6699 - protein, 7 aa, Artificial Sequence
  n-mer motif
ATLNNSY

SEQ ID NO: 6700 - protein, 7 aa, Artificial Sequence
  n-mer motif
RLDVGSP

SEQ ID NO: 6701 - protein, 7 aa, Artificial Sequence
  n-mer motif
YRGREDW

SEQ ID NO: 6702 - protein, 7 aa, Artificial Sequence
  n-mer motif
RGDLSTP

SEQ ID NO: 6703 - protein, 7 aa, Artificial Sequence
  n-mer motif
SGLSHGQ

SEQ ID NO: 6704 - protein, 7 aa, Artificial Sequence
  n-mer motif
EHATAKQ

SEQ ID NO: 6705 - protein, 7 aa, Artificial Sequence
  n-mer motif
GAEAGRQ

SEQ ID NO: 6706 - protein, 7 aa, Artificial Sequence
  n-mer motif
ISGSTTH

SEQ ID NO: 6707 - protein, 7 aa, Artificial Sequence
  n-mer motif
GTVVPGS

SEQ ID NO: 6708 - protein, 7 aa, Artificial Sequence
  n-mer motif
HNNNMLN

SEQ ID NO: 6709 - protein, 7 aa, Artificial Sequence
  n-mer motif
RLTDTMH

SEQ ID NO: 6710 - protein, 7 aa, Artificial Sequence
  n-mer motif
NTYPFNA

SEQ ID NO: 6711 - protein, 7 aa, Artificial Sequence
  n-mer motif
STTTGHM

SEQ ID NO: 6712 - protein, 7 aa, Artificial Sequence
  n-mer motif
VHNPTTT

SEQ ID NO: 6713 - protein, 7 aa, Artificial Sequence
  n-mer motif
NLQVNAN

SEQ ID NO: 6714 - protein, 7 aa, Artificial Sequence
  n-mer motif
RYGESIE

SEQ ID NO: 6715 - protein, 7 aa, Artificial Sequence
  n-mer motif
NTTPPNH

SEQ ID NO: 6716 - protein, 7 aa, Artificial Sequence
  n-mer motif
NTLQNSH

SEQ ID NO: 6717 - protein, 7 aa, Artificial Sequence
  n-mer motif
SLNNMGS

SEQ ID NO: 6718 - protein, 7 aa, Artificial Sequence
  n-mer motif
RNENVNA

SEQ ID NO: 6719 - protein, 7 aa, Artificial Sequence
  n-mer motif
AVHATSS

SEQ ID NO: 6720 - protein, 7 aa, Artificial Sequence
  n-mer motif
TQHLPST

SEQ ID NO: 6721 - protein, 7 aa, Artificial Sequence
  n-mer motif
SVLSQAN

SEQ ID NO: 6722 - protein, 7 aa, Artificial Sequence
  n-mer motif
SSSTEGQ

SEQ ID NO: 6723 - protein, 7 aa, Artificial Sequence
  n-mer motif
GRTDTPN

SEQ ID NO: 6724 - protein, 7 aa, Artificial Sequence
  n-mer motif
VQTHIGV

SEQ ID NO: 6725 - protein, 7 aa, Artificial Sequence
  n-mer motif
TSASENW

SEQ ID NO: 6726 - protein, 7 aa, Artificial Sequence
  n-mer motif
GKANDGS

SEQ ID NO: 6727 - protein, 7 aa, Artificial Sequence
  n-mer motif
VERNTDM

SEQ ID NO: 6728 - protein, 7 aa, Artificial Sequence
  n-mer motif
QNHASGE

SEQ ID NO: 6729 - protein, 7 aa, Artificial Sequence
  n-mer motif
YYEKLSA

SEQ ID NO: 6730 - protein, 7 aa, Artificial Sequence
  n-mer motif
FIANTNP

SEQ ID NO: 6731 - protein, 7 aa, Artificial Sequence
  n-mer motif
TSTASKQ

SEQ ID NO: 6732 - protein, 7 aa, Artificial Sequence
  n-mer motif
NNDNGFV

SEQ ID NO: 6733 - protein, 7 aa, Artificial Sequence
  n-mer motif
ANSIGGP

SEQ ID NO: 6734 - protein, 7 aa, Artificial Sequence
  n-mer motif
TGQLVGT

SEQ ID NO: 6735 - protein, 7 aa, Artificial Sequence
  n-mer motif
YSQSLSE

SEQ ID NO: 6736 - protein, 7 aa, Artificial Sequence
  n-mer motif
VYNGNVV

SEQ ID NO: 6737 - protein, 7 aa, Artificial Sequence
  n-mer motif
NSAESSR

SEQ ID NO: 6738 - protein, 7 aa, Artificial Sequence
  n-mer motif
TRNLSES

SEQ ID NO: 6739 - protein, 7 aa, Artificial Sequence
  n-mer motif
SMSDGLR

SEQ ID NO: 6740 - protein, 7 aa, Artificial Sequence
  n-mer motif
VGDQSRP

SEQ ID NO: 6741 - protein, 7 aa, Artificial Sequence
  n-mer motif
FTVNQDL

SEQ ID NO: 6742 - protein, 7 aa, Artificial Sequence
  n-mer motif
YHKYSTD

SEQ ID NO: 6743 - protein, 7 aa, Artificial Sequence
  n-mer motif
YGVQANS

SEQ ID NO: 6744 - protein, 7 aa, Artificial Sequence
  n-mer motif
LQTPGTT

SEQ ID NO: 6745 - protein, 7 aa, Artificial Sequence
  n-mer motif
YQQTSST

SEQ ID NO: 6746 - protein, 7 aa, Artificial Sequence
  n-mer motif
QTNTNDR

SEQ ID NO: 6747 - protein, 7 aa, Artificial Sequence
  n-mer motif
MDKSNNS

SEQ ID NO: 6748 - protein, 7 aa, Artificial Sequence
  n-mer motif
HLSQANH

SEQ ID NO: 6749 - protein, 7 aa, Artificial Sequence
  n-mer motif
VGASTAS

SEQ ID NO: 6750 - protein, 7 aa, Artificial Sequence
  n-mer motif
HNNNLQN

SEQ ID NO: 6751 - protein, 7 aa, Artificial Sequence
  n-mer motif
STYGNTY

SEQ ID NO: 6752 - protein, 7 aa, Artificial Sequence
  n-mer motif
RADVSWS

SEQ ID NO: 6753 - protein, 7 aa, Artificial Sequence
  n-mer motif
RGDNSTP

SEQ ID NO: 6754 - protein, 7 aa, Artificial Sequence
  n-mer motif
GRDYAMS

SEQ ID NO: 6755 - protein, 7 aa, Artificial Sequence
  n-mer motif
PNNEKNP

SEQ ID NO: 6756 - protein, 7 aa, Artificial Sequence
  n-mer motif
DNVNSQP

SEQ ID NO: 6757 - protein, 7 aa, Artificial Sequence
  n-mer motif
MGTEYRM

SEQ ID NO: 6758 - protein, 7 aa, Artificial Sequence
  n-mer motif
NQSINNI

SEQ ID NO: 6759 - protein, 7 aa, Artificial Sequence
  n-mer motif
AIDSIKQ

SEQ ID NO: 6760 - protein, 7 aa, Artificial Sequence
  n-mer motif
VESSYSR

SEQ ID NO: 6761 - protein, 7 aa, Artificial Sequence
  n-mer motif
GQYSQTL

SEQ ID NO: 6762 - protein, 7 aa, Artificial Sequence
  n-mer motif
TIQDHIK

SEQ ID NO: 6763 - protein, 7 aa, Artificial Sequence
  n-mer motif
NSSQWPN

SEQ ID NO: 6764 - protein, 7 aa, Artificial Sequence
  n-mer motif
TDNGLLV

SEQ ID NO: 6765 - protein, 7 aa, Artificial Sequence
  n-mer motif
VRETTHL

SEQ ID NO: 6766 - protein, 7 aa, Artificial Sequence
  n-mer motif
RGDMTRA

SEQ ID NO: 6767 - protein, 7 aa, Artificial Sequence
  n-mer motif
TYGITHD

SEQ ID NO: 6768 - protein, 7 aa, Artificial Sequence
  n-mer motif
TALNTYP

SEQ ID NO: 6769 - protein, 7 aa, Artificial Sequence
  n-mer motif
GGENRTP

SEQ ID NO: 6770 - protein, 7 aa, Artificial Sequence
  n-mer motif
YLQEKFP

SEQ ID NO: 6771 - protein, 7 aa, Artificial Sequence
  n-mer motif
LNLTNHN

SEQ ID NO: 6772 - protein, 7 aa, Artificial Sequence
  n-mer motif
GLASLHL

SEQ ID NO: 6773 - protein, 7 aa, Artificial Sequence
  n-mer motif
VEHVAHQ

SEQ ID NO: 6774 - protein, 7 aa, Artificial Sequence
  n-mer motif
SEHHAGI

SEQ ID NO: 6775 - protein, 7 aa, Artificial Sequence
  n-mer motif
EASNYER

SEQ ID NO: 6776 - protein, 7 aa, Artificial Sequence
  n-mer motif
PSNSERF

SEQ ID NO: 6777 - protein, 7 aa, Artificial Sequence
  n-mer motif
SPGNGLL

SEQ ID NO: 6778 - protein, 7 aa, Artificial Sequence
  n-mer motif
ILKSDAP

SEQ ID NO: 6779 - protein, 7 aa, Artificial Sequence
  n-mer motif
FDSANGR

SEQ ID NO: 6780 - protein, 7 aa, Artificial Sequence
  n-mer motif
DGKTTSN

SEQ ID NO: 6781 - protein, 7 aa, Artificial Sequence
  n-mer motif
TNYPEAN

SEQ ID NO: 6782 - protein, 7 aa, Artificial Sequence
  n-mer motif
RGDHSTP

SEQ ID NO: 6783 - protein, 7 aa, Artificial Sequence
  n-mer motif
QTTILAA

SEQ ID NO: 6784 - protein, 7 aa, Artificial Sequence
  n-mer motif
ATAHQDG

SEQ ID NO: 6785 - protein, 7 aa, Artificial Sequence
  n-mer motif
QALATTN

SEQ ID NO: 6786 - protein, 7 aa, Artificial Sequence
  n-mer motif
YNATPSQ

SEQ ID NO: 6787 - protein, 7 aa, Artificial Sequence
  n-mer motif
ELSTPMV

SEQ ID NO: 6788 - protein, 7 aa, Artificial Sequence
  n-mer motif
INISSDF

SEQ ID NO: 6789 - protein, 7 aa, Artificial Sequence
  n-mer motif
VTAHQLS

SEQ ID NO: 6790 - protein, 7 aa, Artificial Sequence
  n-mer motif
GESSSIS

SEQ ID NO: 6791 - protein, 7 aa, Artificial Sequence
  n-mer motif
ESLPISK

SEQ ID NO: 6792 - protein, 7 aa, Artificial Sequence
  n-mer motif
TNVSTLL

SEQ ID NO: 6793 - protein, 7 aa, Artificial Sequence
  n-mer motif
WQTNGMQ

SEQ ID NO: 6794 - protein, 7 aa, Artificial Sequence
  n-mer motif
YRMETNP

SEQ ID NO: 6795 - protein, 7 aa, Artificial Sequence
  n-mer motif
ITGNTVG

SEQ ID NO: 6796 - protein, 7 aa, Artificial Sequence
  n-mer motif
LNTLIHK

SEQ ID NO: 6797 - protein, 7 aa, Artificial Sequence
  n-mer motif
GTSLENR

SEQ ID NO: 6798 - protein, 7 aa, Artificial Sequence
  n-mer motif
YQHNQAH

SEQ ID NO: 6799 - protein, 7 aa, Artificial Sequence
  n-mer motif
IESKTVQ

SEQ ID NO: 6800 - protein, 7 aa, Artificial Sequence
  n-mer motif
YTQGIMN

SEQ ID NO: 6801 - protein, 7 aa, Artificial Sequence
  n-mer motif
STNEAPK

SEQ ID NO: 6802 - protein, 7 aa, Artificial Sequence
  n-mer motif
LSQNFNP

SEQ ID NO: 6803 - protein, 7 aa, Artificial Sequence
  n-mer motif
YSSEMSE

SEQ ID NO: 6804 - protein, 7 aa, Artificial Sequence
  n-mer motif
SYGGSGP

SEQ ID NO: 6805 - protein, 7 aa, Artificial Sequence
  n-mer motif
MDAAYGS

SEQ ID NO: 6806 - protein, 7 aa, Artificial Sequence
  n-mer motif
PFNPGNV

SEQ ID NO: 6807 - protein, 7 aa, Artificial Sequence
  n-mer motif
QKSETYT

SEQ ID NO: 6808 - protein, 7 aa, Artificial Sequence
  n-mer motif
NKDHNHL

SEQ ID NO: 6809 - protein, 7 aa, Artificial Sequence
  n-mer motif
LTGSDMK

SEQ ID NO: 6810 - protein, 7 aa, Artificial Sequence
  n-mer motif
SKDSTMY

SEQ ID NO: 6811 - protein, 7 aa, Artificial Sequence
  n-mer motif
EAFPRAG

SEQ ID NO: 6812 - protein, 7 aa, Artificial Sequence
  n-mer motif
EHTHLNP

SEQ ID NO: 6813 - protein, 7 aa, Artificial Sequence
  n-mer motif
SSDPKGQ

SEQ ID NO: 6814 - protein, 7 aa, Artificial Sequence
  n-mer motif
KTIDIAQ

SEQ ID NO: 6815 - protein, 7 aa, Artificial Sequence
  n-mer motif
TGSLNSM

SEQ ID NO: 6816 - protein, 7 aa, Artificial Sequence
  n-mer motif
MQREDAN

SEQ ID NO: 6817 - protein, 7 aa, Artificial Sequence
  n-mer motif
ASTVSLY

SEQ ID NO: 6818 - protein, 7 aa, Artificial Sequence
  n-mer motif
GRDDLTN

SEQ ID NO: 6819 - protein, 7 aa, Artificial Sequence
  n-mer motif
SNPGNHN

SEQ ID NO: 6820 - protein, 7 aa, Artificial Sequence
  n-mer motif
DTYKGKW

SEQ ID NO: 6821 - protein, 7 aa, Artificial Sequence
  n-mer motif
PPNGSSR

SEQ ID NO: 6822 - protein, 7 aa, Artificial Sequence
  n-mer motif
ASYSISD

SEQ ID NO: 6823 - protein, 7 aa, Artificial Sequence
  n-mer motif
VTVSLDG

SEQ ID NO: 6824 - protein, 7 aa, Artificial Sequence
  n-mer motif
MAIGHSP

SEQ ID NO: 6825 - protein, 7 aa, Artificial Sequence
  n-mer motif
FRTVYTG

SEQ ID NO: 6826 - protein, 7 aa, Artificial Sequence
  n-mer motif
KKRQPIA

SEQ ID NO: 6827 - protein, 7 aa, Artificial Sequence
  n-mer motif
KNKLYYG

SEQ ID NO: 6828 - protein, 7 aa, Artificial Sequence
  n-mer motif
STSPVNS

SEQ ID NO: 6829 - protein, 7 aa, Artificial Sequence
  n-mer motif
GSGIAGT

SEQ ID NO: 6830 - protein, 7 aa, Artificial Sequence
  n-mer motif
IDVLNGS

SEQ ID NO: 6831 - protein, 7 aa, Artificial Sequence
  n-mer motif
GHNMAQA

SEQ ID NO: 6832 - protein, 7 aa, Artificial Sequence
  n-mer motif
TRSNSDE

SEQ ID NO: 6833 - protein, 7 aa, Artificial Sequence
  n-mer motif
GAKGTMG

SEQ ID NO: 6834 - protein, 7 aa, Artificial Sequence
  n-mer motif
ATTLTGD

SEQ ID NO: 6835 - protein, 7 aa, Artificial Sequence
  n-mer motif
FNTSSEF

SEQ ID NO: 6836 - protein, 7 aa, Artificial Sequence
  n-mer motif
YTAQTGW

SEQ ID NO: 6837 - protein, 7 aa, Artificial Sequence
  n-mer motif
RVNNDAI

SEQ ID NO: 6838 - protein, 7 aa, Artificial Sequence
  n-mer motif
TIQLTDT

SEQ ID NO: 6839 - protein, 7 aa, Artificial Sequence
  n-mer motif
ASMPSVD

SEQ ID NO: 6840 - protein, 7 aa, Artificial Sequence
  n-mer motif
NQVGASA

SEQ ID NO: 6841 - protein, 7 aa, Artificial Sequence
  n-mer motif
GNMVTPN

SEQ ID NO: 6842 - protein, 7 aa, Artificial Sequence
  n-mer motif
RGDQGTH

SEQ ID NO: 6843 - protein, 7 aa, Artificial Sequence
  n-mer motif
SSDSRIP

SEQ ID NO: 6844 - protein, 7 aa, Artificial Sequence
  n-mer motif
GLHGTNA

SEQ ID NO: 6845 - protein, 7 aa, Artificial Sequence
  n-mer motif
SSYQSGL

SEQ ID NO: 6846 - protein, 7 aa, Artificial Sequence
  n-mer motif
TAYSPTV

SEQ ID NO: 6847 - protein, 7 aa, Artificial Sequence
  n-mer motif
RSDTTNA

SEQ ID NO: 6848 - protein, 7 aa, Artificial Sequence
  n-mer motif
RIVANEQ

SEQ ID NO: 6849 - protein, 7 aa, Artificial Sequence
  n-mer motif
IHNESYV

SEQ ID NO: 6850 - protein, 7 aa, Artificial Sequence
  n-mer motif
QQNTRLP

SEQ ID NO: 6851 - protein, 7 aa, Artificial Sequence
  n-mer motif
GINSSHF

SEQ ID NO: 6852 - protein, 7 aa, Artificial Sequence
  n-mer motif
GMTSNQV

SEQ ID NO: 6853 - protein, 7 aa, Artificial Sequence
  n-mer motif
REIVHSN

SEQ ID NO: 6854 - protein, 7 aa, Artificial Sequence
  n-mer motif
AEHTYTV

SEQ ID NO: 6855 - protein, 7 aa, Artificial Sequence
  n-mer motif
PATLHLT

SEQ ID NO: 6856 - protein, 7 aa, Artificial Sequence
  n-mer motif
KQTDSRG

SEQ ID NO: 6857 - protein, 7 aa, Artificial Sequence
  n-mer motif
TMVEVLP

SEQ ID NO: 6858 - protein, 7 aa, Artificial Sequence
  n-mer motif
IPTGQTS

SEQ ID NO: 6859 - protein, 7 aa, Artificial Sequence
  n-mer motif
MIKTNML

SEQ ID NO: 6860 - protein, 7 aa, Artificial Sequence
  n-mer motif
AERPTRD

SEQ ID NO: 6861 - protein, 7 aa, Artificial Sequence
  n-mer motif
RDLGQTG

SEQ ID NO: 6862 - protein, 7 aa, Artificial Sequence
  n-mer motif
NEGRVQT

SEQ ID NO: 6863 - protein, 7 aa, Artificial Sequence
  n-mer motif
TAASTAR

SEQ ID NO: 6864 - protein, 7 aa, Artificial Sequence
  n-mer motif
TQGNNMV

SEQ ID NO: 6865 - protein, 7 aa, Artificial Sequence
  n-mer motif
HSTFPTT

SEQ ID NO: 6866 - protein, 7 aa, Artificial Sequence
  n-mer motif
QSIGHPV

SEQ ID NO: 6867 - protein, 7 aa, Artificial Sequence
  n-mer motif
SGVNSER

SEQ ID NO: 6868 - protein, 7 aa, Artificial Sequence
  n-mer motif
PHANGVT

SEQ ID NO: 6869 - protein, 7 aa, Artificial Sequence
  n-mer motif
DHQQALA

SEQ ID NO: 6870 - protein, 7 aa, Artificial Sequence
  n-mer motif
SQQGFTL

SEQ ID NO: 6871 - protein, 7 aa, Artificial Sequence
  n-mer motif
TNAALVP

SEQ ID NO: 6872 - protein, 7 aa, Artificial Sequence
  n-mer motif
GVSSNSA

SEQ ID NO: 6873 - protein, 7 aa, Artificial Sequence
  n-mer motif
HDTVGER

SEQ ID NO: 6874 - protein, 7 aa, Artificial Sequence
  n-mer motif
ALNAQGI

SEQ ID NO: 6875 - protein, 7 aa, Artificial Sequence
  n-mer motif
HDSMCCA

SEQ ID NO: 6876 - protein, 7 aa, Artificial Sequence
  n-mer motif
YIAAGEQ

SEQ ID NO: 6877 - protein, 7 aa, Artificial Sequence
  n-mer motif
ENAREGV

SEQ ID NO: 6878 - protein, 7 aa, Artificial Sequence
  n-mer motif
ATVYNEL

SEQ ID NO: 6879 - protein, 7 aa, Artificial Sequence
  n-mer motif
DTNGIKS

SEQ ID NO: 6880 - protein, 7 aa, Artificial Sequence
  n-mer motif
KPTANDW

SEQ ID NO: 6881 - protein, 7 aa, Artificial Sequence
  n-mer motif
YESTHVN

SEQ ID NO: 6882 - protein, 7 aa, Artificial Sequence
  n-mer motif
YTNGGHL

SEQ ID NO: 6883 - protein, 7 aa, Artificial Sequence
  n-mer motif
VDKSSPV

SEQ ID NO: 6884 - protein, 7 aa, Artificial Sequence
  n-mer motif
PIQNESS

SEQ ID NO: 6885 - protein, 7 aa, Artificial Sequence
  n-mer motif
IHKSSVE

SEQ ID NO: 6886 - protein, 7 aa, Artificial Sequence
  n-mer motif
HDISLDR

SEQ ID NO: 6887 - protein, 6 aa, Artificial Sequence
  n-mer motif
WGAEFA

SEQ ID NO: 6888 - protein, 7 aa, Artificial Sequence
  n-mer motif
YSQSIKN

SEQ ID NO: 6889 - protein, 7 aa, Artificial Sequence
  n-mer motif
AQDNNHD

SEQ ID NO: 6890 - protein, 7 aa, Artificial Sequence
  n-mer motif
GQKETTA

SEQ ID NO: 6891 - protein, 7 aa, Artificial Sequence
  n-mer motif
KSEVPAR

SEQ ID NO: 6892 - protein, 7 aa, Artificial Sequence
  n-mer motif
ELNTAHA

SEQ ID NO: 6893 - protein, 7 aa, Artificial Sequence
  n-mer motif
STNAGQR

SEQ ID NO: 6894 - protein, 7 aa, Artificial Sequence
  n-mer motif
KAVSEII

SEQ ID NO: 6895 - protein, 7 aa, Artificial Sequence
  n-mer motif
TFTVDGR

SEQ ID NO: 6896 - protein, 7 aa, Artificial Sequence
  n-mer motif
STSGYNT

SEQ ID NO: 6897 - protein, 7 aa, Artificial Sequence
  n-mer motif
NHSLSEH

SEQ ID NO: 6898 - protein, 7 aa, Artificial Sequence
  n-mer motif
SMQDPSL

SEQ ID NO: 6899 - protein, 7 aa, Artificial Sequence
  n-mer motif
EQQKTDN

SEQ ID NO: 6900 - protein, 7 aa, Artificial Sequence
  n-mer motif
AVVNENM

SEQ ID NO: 6901 - protein, 7 aa, Artificial Sequence
  n-mer motif
GPGENYR

SEQ ID NO: 6902 - protein, 7 aa, Artificial Sequence
  n-mer motif
YNAGGEQ

SEQ ID NO: 6903 - protein, 7 aa, Artificial Sequence
  n-mer motif
VLSSNLY

SEQ ID NO: 6904 - protein, 7 aa, Artificial Sequence
  n-mer motif
GLYQNPT

SEQ ID NO: 6905 - protein, 7 aa, Artificial Sequence
  n-mer motif
SSGSLIT

SEQ ID NO: 6906 - protein, 7 aa, Artificial Sequence
  n-mer motif
YNTDRTN

SEQ ID NO: 6907 - protein, 7 aa, Artificial Sequence
  n-mer motif
EKPQHNS

SEQ ID NO: 6908 - protein, 7 aa, Artificial Sequence
  n-mer motif
AAYEHAP

SEQ ID NO: 6909 - protein, 7 aa, Artificial Sequence
  n-mer motif
GGNYNTT

SEQ ID NO: 6910 - protein, 7 aa, Artificial Sequence
  n-mer motif
YLNSTQI

SEQ ID NO: 6911 - protein, 7 aa, Artificial Sequence
  n-mer motif
SNSNTAA

SEQ ID NO: 6912 - protein, 7 aa, Artificial Sequence
  n-mer motif
SDNRNTA

SEQ ID NO: 6913 - protein, 7 aa, Artificial Sequence
  n-mer motif
RSLDSGM

SEQ ID NO: 6914 - protein, 7 aa, Artificial Sequence
  n-mer motif
VMDTHGM

SEQ ID NO: 6915 - protein, 7 aa, Artificial Sequence
  n-mer motif
HVTAVVD

SEQ ID NO: 6916 - protein, 7 aa, Artificial Sequence
  n-mer motif
SITHSNT

SEQ ID NO: 6917 - protein, 7 aa, Artificial Sequence
  n-mer motif
GYGSYSN

SEQ ID NO: 6918 - protein, 7 aa, Artificial Sequence
  n-mer motif
RWSENNS

SEQ ID NO: 6919 - protein, 7 aa, Artificial Sequence
  n-mer motif
MSSHTVQ

SEQ ID NO: 6920 - protein, 7 aa, Artificial Sequence
  n-mer motif
YVRAQDQ

SEQ ID NO: 6921 - protein, 7 aa, Artificial Sequence
  n-mer motif
FEGDKTY

SEQ ID NO: 6922 - protein, 7 aa, Artificial Sequence
  n-mer motif
VSSGHTK

SEQ ID NO: 6923 - protein, 7 aa, Artificial Sequence
  n-mer motif
SMNLPTS

SEQ ID NO: 6924 - protein, 7 aa, Artificial Sequence
  n-mer motif
LNPQHEL

SEQ ID NO: 6925 - protein, 7 aa, Artificial Sequence
  n-mer motif
LPPASAG

SEQ ID NO: 6926 - protein, 7 aa, Artificial Sequence
  n-mer motif
GGNSHGV

SEQ ID NO: 6927 - protein, 7 aa, Artificial Sequence
  n-mer motif
GGTGLSK

SEQ ID NO: 6928 - protein, 7 aa, Artificial Sequence
  n-mer motif
SLNSSST

SEQ ID NO: 6929 - protein, 7 aa, Artificial Sequence
  n-mer motif
MPSEPPG

SEQ ID NO: 6930 - protein, 7 aa, Artificial Sequence
  n-mer motif
VVHSSIT

SEQ ID NO: 6931 - protein, 7 aa, Artificial Sequence
  n-mer motif
LSLAGNR

SEQ ID NO: 6932 - protein, 7 aa, Artificial Sequence
  n-mer motif
ADMQHTV

SEQ ID NO: 6933 - protein, 7 aa, Artificial Sequence
  n-mer motif
FRDGQGM

SEQ ID NO: 6934 - protein, 7 aa, Artificial Sequence
  n-mer motif
TGTAISR

SEQ ID NO: 6935 - protein, 7 aa, Artificial Sequence
  n-mer motif
MGKHEGL

SEQ ID NO: 6936 - protein, 7 aa, Artificial Sequence
  n-mer motif
PESAAKS

SEQ ID NO: 6937 - protein, 7 aa, Artificial Sequence
  n-mer motif
TQAFSLG

SEQ ID NO: 6938 - protein, 7 aa, Artificial Sequence
  n-mer motif
TDGIFQP

SEQ ID NO: 6939 - protein, 7 aa, Artificial Sequence
  n-mer motif
GSPVIVN

SEQ ID NO: 6940 - protein, 7 aa, Artificial Sequence
  n-mer motif
GRDNHHA

SEQ ID NO: 6941 - protein, 7 aa, Artificial Sequence
  n-mer motif
PRSITEL

SEQ ID NO: 6942 - protein, 7 aa, Artificial Sequence
  n-mer motif
WVNSVGN

SEQ ID NO: 6943 - protein, 7 aa, Artificial Sequence
  n-mer motif
VHGTLTY

SEQ ID NO: 6944 - protein, 7 aa, Artificial Sequence
  n-mer motif
GVYIDGR

SEQ ID NO: 6945 - protein, 7 aa, Artificial Sequence
  n-mer motif
MSNDLPG

SEQ ID NO: 6946 - protein, 7 aa, Artificial Sequence
  n-mer motif
NRSDSFA

SEQ ID NO: 6947 - protein, 7 aa, Artificial Sequence
  n-mer motif
GQTNAVH

SEQ ID NO: 6948 - protein, 7 aa, Artificial Sequence
  n-mer motif
YVDKSMT

SEQ ID NO: 6949 - protein, 7 aa, Artificial Sequence
  n-mer motif
SVMVGTN

SEQ ID NO: 6950 - protein, 7 aa, Artificial Sequence
  n-mer motif
IGLQNST

SEQ ID NO: 6951 - protein, 7 aa, Artificial Sequence
  n-mer motif
NDRPLAS

SEQ ID NO: 6952 - protein, 7 aa, Artificial Sequence
  n-mer motif
LMGSPGA

SEQ ID NO: 6953 - protein, 7 aa, Artificial Sequence
  n-mer motif
IDRSASL

SEQ ID NO: 6954 - protein, 7 aa, Artificial Sequence
  n-mer motif
IQAKNSE

SEQ ID NO: 6955 - protein, 7 aa, Artificial Sequence
  n-mer motif
HQSFDAG

SEQ ID NO: 6956 - protein, 7 aa, Artificial Sequence
  n-mer motif
AVNETRL

SEQ ID NO: 6957 - protein, 7 aa, Artificial Sequence
  n-mer motif
IASTWNM

SEQ ID NO: 6958 - protein, 7 aa, Artificial Sequence
  n-mer motif
KVDMTSK

SEQ ID NO: 6959 - protein, 7 aa, Artificial Sequence
  n-mer motif
SHSITGL

SEQ ID NO: 6960 - protein, 7 aa, Artificial Sequence
  n-mer motif
TITSPSV

SEQ ID NO: 6961 - protein, 7 aa, Artificial Sequence
  n-mer motif
EHISSYG

SEQ ID NO: 6962 - protein, 7 aa, Artificial Sequence
  n-mer motif
FSTNSVI

SEQ ID NO: 6963 - protein, 7 aa, Artificial Sequence
  n-mer motif
SMEGQQH

SEQ ID NO: 6964 - protein, 7 aa, Artificial Sequence
  n-mer motif
VDKSEAV

SEQ ID NO: 6965 - protein, 7 aa, Artificial Sequence
  n-mer motif
QANLSII

SEQ ID NO: 6966 - protein, 7 aa, Artificial Sequence
  n-mer motif
VKASAGV

SEQ ID NO: 6967 - protein, 7 aa, Artificial Sequence
  n-mer motif
FGTSYTT

SEQ ID NO: 6968 - protein, 7 aa, Artificial Sequence
  n-mer motif
GLTGYPM

SEQ ID NO: 6969 - protein, 7 aa, Artificial Sequence
  n-mer motif
AMGALVH

SEQ ID NO: 6970 - protein, 7 aa, Artificial Sequence
  n-mer motif
VYATALA

SEQ ID NO: 6971 - protein, 7 aa, Artificial Sequence
  n-mer motif
TLTDVHR

SEQ ID NO: 6972 - protein, 7 aa, Artificial Sequence
  n-mer motif
PSSAGST

SEQ ID NO: 6973 - protein, 6 aa, Artificial Sequence
  n-mer motif
KKRKHL

SEQ ID NO: 6974 - protein, 7 aa, Artificial Sequence
  n-mer motif
AYQLTPA

SEQ ID NO: 6975 - protein, 7 aa, Artificial Sequence
  n-mer motif
LAPDNIG

SEQ ID NO: 6976 - protein, 7 aa, Artificial Sequence
  n-mer motif
TIVSAYA

SEQ ID NO: 6977 - protein, 7 aa, Artificial Sequence
  n-mer motif
GNNLSLS

SEQ ID NO: 6978 - protein, 7 aa, Artificial Sequence
  n-mer motif
STNTEPR

SEQ ID NO: 6979 - protein, 7 aa, Artificial Sequence
  n-mer motif
SFQTDRA

SEQ ID NO: 6980 - protein, 7 aa, Artificial Sequence
  n-mer motif
FLEGVAQ

SEQ ID NO: 6981 - protein, 7 aa, Artificial Sequence
  n-mer motif
QDVGRTN

SEQ ID NO: 6982 - protein, 7 aa, Artificial Sequence
  n-mer motif
THGDHIQ

SEQ ID NO: 6983 - protein, 7 aa, Artificial Sequence
  n-mer motif
VSEGQRI

SEQ ID NO: 6984 - protein, 7 aa, Artificial Sequence
  n-mer motif
NMGPMGR

SEQ ID NO: 6985 - protein, 7 aa, Artificial Sequence
  n-mer motif
LPSTETL

SEQ ID NO: 6986 - protein, 7 aa, Artificial Sequence
  n-mer motif
GGMSAHS

SEQ ID NO: 6987 - protein, 7 aa, Artificial Sequence
  n-mer motif
GMIGHNA

SEQ ID NO: 6988 - protein, 7 aa, Artificial Sequence
  n-mer motif
IDERSSI

SEQ ID NO: 6989 - protein, 7 aa, Artificial Sequence
  n-mer motif
HVNPTPA

SEQ ID NO: 6990 - protein, 7 aa, Artificial Sequence
  n-mer motif
WSRTGNT

SEQ ID NO: 6991 - protein, 7 aa, Artificial Sequence
  n-mer motif
IKDSYLT

SEQ ID NO: 6992 - protein, 7 aa, Artificial Sequence
  n-mer motif
LNQNSVS

SEQ ID NO: 6993 - protein, 7 aa, Artificial Sequence
  n-mer motif
SGPIPAV

SEQ ID NO: 6994 - protein, 7 aa, Artificial Sequence
  n-mer motif
MQGLNNM

SEQ ID NO: 6995 - protein, 7 aa, Artificial Sequence
  n-mer motif
SNSGGNH

SEQ ID NO: 6996 - protein, 7 aa, Artificial Sequence
  n-mer motif
TSTMTAR

SEQ ID NO: 6997 - protein, 7 aa, Artificial Sequence
  n-mer motif
ENSDLSY

SEQ ID NO: 6998 - protein, 7 aa, Artificial Sequence
  n-mer motif
HPGNSSV

SEQ ID NO: 6999 - protein, 7 aa, Artificial Sequence
  n-mer motif
LTPQGTS

SEQ ID NO: 7000 - protein, 7 aa, Artificial Sequence
  n-mer motif
TDTRKND

SEQ ID NO: 7001 - protein, 7 aa, Artificial Sequence
  n-mer motif
GETLRSQ

SEQ ID NO: 7002 - protein, 7 aa, Artificial Sequence
  n-mer motif
SGVSEGN

SEQ ID NO: 7003 - protein, 7 aa, Artificial Sequence
  n-mer motif
TQYGTLP

SEQ ID NO: 7004 - protein, 7 aa, Artificial Sequence
  n-mer motif
GTVNSSA

SEQ ID NO: 7005 - protein, 7 aa, Artificial Sequence
  n-mer motif
GKATLVL

SEQ ID NO: 7006 - protein, 7 aa, Artificial Sequence
  n-mer motif
GIYPAST

SEQ ID NO: 7007 - protein, 7 aa, Artificial Sequence
  n-mer motif
GVMSNAT

SEQ ID NO: 7008 - protein, 7 aa, Artificial Sequence
  n-mer motif
THVIGAV

SEQ ID NO: 7009 - protein, 7 aa, Artificial Sequence
  n-mer motif
TRSDIGV

SEQ ID NO: 7010 - protein, 7 aa, Artificial Sequence
  n-mer motif
TLTLSTL

SEQ ID NO: 7011 - protein, 7 aa, Artificial Sequence
  n-mer motif
YNESSNA

SEQ ID NO: 7012 - protein, 7 aa, Artificial Sequence
  n-mer motif
STQAQTG

SEQ ID NO: 7013 - protein, 7 aa, Artificial Sequence
  n-mer motif
RDMINSS

SEQ ID NO: 7014 - protein, 7 aa, Artificial Sequence
  n-mer motif
TKGNNLV

SEQ ID NO: 7015 - protein, 7 aa, Artificial Sequence
  n-mer motif
GSTVSAQ

SEQ ID NO: 7016 - protein, 7 aa, Artificial Sequence
  n-mer motif
RGDTMNY

SEQ ID NO: 7017 - protein, 7 aa, Artificial Sequence
  n-mer motif
HADVNAG

SEQ ID NO: 7018 - protein, 7 aa, Artificial Sequence
  n-mer motif
SVVNTNI

SEQ ID NO: 7019 - protein, 7 aa, Artificial Sequence
  n-mer motif
SNVHVVN

SEQ ID NO: 7020 - protein, 7 aa, Artificial Sequence
  n-mer motif
SVDKPPG

SEQ ID NO: 7021 - protein, 7 aa, Artificial Sequence
  n-mer motif
DRTYSNT

SEQ ID NO: 7022 - protein, 7 aa, Artificial Sequence
  n-mer motif
YSGELNK

SEQ ID NO: 7023 - protein, 7 aa, Artificial Sequence
  n-mer motif
YDKTLSV

SEQ ID NO: 7024 - protein, 7 aa, Artificial Sequence
  n-mer motif
HTATLSS

SEQ ID NO: 7025 - protein, 7 aa, Artificial Sequence
  n-mer motif
ALERAQY

SEQ ID NO: 7026 - protein, 7 aa, Artificial Sequence
  n-mer motif
GTSDNYR

SEQ ID NO: 7027 - protein, 7 aa, Artificial Sequence
  n-mer motif
HVNSRDL

SEQ ID NO: 7028 - protein, 7 aa, Artificial Sequence
  n-mer motif
SSDVTRQ

SEQ ID NO: 7029 - protein, 7 aa, Artificial Sequence
  n-mer motif
AHHMTTE

SEQ ID NO: 7030 - protein, 7 aa, Artificial Sequence
  n-mer motif
EVSRDGL

SEQ ID NO: 7031 - protein, 7 aa, Artificial Sequence
  n-mer motif
VGRDAEA

SEQ ID NO: 7032 - protein, 7 aa, Artificial Sequence
  n-mer motif
AHQKDLR

SEQ ID NO: 7033 - protein, 7 aa, Artificial Sequence
  n-mer motif
SVLSSST

SEQ ID NO: 7034 - protein, 7 aa, Artificial Sequence
  n-mer motif
LGTLLSQ

SEQ ID NO: 7035 - protein, 7 aa, Artificial Sequence
  n-mer motif
SQKPIDD

SEQ ID NO: 7036 - protein, 7 aa, Artificial Sequence
  n-mer motif
DNVHGQV

SEQ ID NO: 7037 - protein, 7 aa, Artificial Sequence
  n-mer motif
GSHNGPT

SEQ ID NO: 7038 - protein, 7 aa, Artificial Sequence
  n-mer motif
ISGSSSL

SEQ ID NO: 7039 - protein, 7 aa, Artificial Sequence
  n-mer motif
GFHINGE

SEQ ID NO: 7040 - protein, 7 aa, Artificial Sequence
  n-mer motif
MSDGHSK

SEQ ID NO: 7041 - protein, 7 aa, Artificial Sequence
  n-mer motif
TVGGNHH

SEQ ID NO: 7042 - protein, 7 aa, Artificial Sequence
  n-mer motif
NATPPNH

SEQ ID NO: 7043 - protein, 7 aa, Artificial Sequence
  n-mer motif
TGMNSNK

SEQ ID NO: 7044 - protein, 7 aa, Artificial Sequence
  n-mer motif
IEAYSRD

SEQ ID NO: 7045 - protein, 7 aa, Artificial Sequence
  n-mer motif
RDRQDSV

SEQ ID NO: 7046 - protein, 7 aa, Artificial Sequence
  n-mer motif
HTVQIRE

SEQ ID NO: 7047 - protein, 7 aa, Artificial Sequence
  n-mer motif
TLTQTGM

SEQ ID NO: 7048 - protein, 7 aa, Artificial Sequence
  n-mer motif
INNFNTL

SEQ ID NO: 7049 - protein, 7 aa, Artificial Sequence
  n-mer motif
VAAGPEA

SEQ ID NO: 7050 - protein, 7 aa, Artificial Sequence
  n-mer motif
DGKNSYA

SEQ ID NO: 7051 - protein, 7 aa, Artificial Sequence
  n-mer motif
SRQENFS

SEQ ID NO: 7052 - protein, 7 aa, Artificial Sequence
  n-mer motif
SNSSVAV

SEQ ID NO: 7053 - protein, 7 aa, Artificial Sequence
  n-mer motif
DHSKQSS

SEQ ID NO: 7054 - protein, 7 aa, Artificial Sequence
  n-mer motif
LSGAGSQ

SEQ ID NO: 7055 - protein, 7 aa, Artificial Sequence
  n-mer motif
GWSNNEL

SEQ ID NO: 7056 - protein, 7 aa, Artificial Sequence
  n-mer motif
LIRGSME

SEQ ID NO: 7057 - protein, 7 aa, Artificial Sequence
  n-mer motif
NTYTAGK

SEQ ID NO: 7058 - protein, 7 aa, Artificial Sequence
  n-mer motif
TRGDMEF

SEQ ID NO: 7059 - protein, 7 aa, Artificial Sequence
  n-mer motif
LMSGKEN

SEQ ID NO: 7060 - protein, 7 aa, Artificial Sequence
  n-mer motif
KDTNQQI

SEQ ID NO: 7061 - protein, 7 aa, Artificial Sequence
  n-mer motif
HNVGLGH

SEQ ID NO: 7062 - protein, 7 aa, Artificial Sequence
  n-mer motif
PDQPGPS

SEQ ID NO: 7063 - protein, 7 aa, Artificial Sequence
  n-mer motif
MQREAAN

SEQ ID NO: 7064 - protein, 7 aa, Artificial Sequence
  n-mer motif
GQRTTND

SEQ ID NO: 7065 - protein, 7 aa, Artificial Sequence
  n-mer motif
KHTENGT

SEQ ID NO: 7066 - protein, 7 aa, Artificial Sequence
  n-mer motif
LDVTRMR

SEQ ID NO: 7067 - protein, 7 aa, Artificial Sequence
  n-mer motif
TLDRNQT

SEQ ID NO: 7068 - protein, 7 aa, Artificial Sequence
  n-mer motif
INAGNYR

SEQ ID NO: 7069 - protein, 7 aa, Artificial Sequence
  n-mer motif
AVDQSRL

SEQ ID NO: 7070 - protein, 7 aa, Artificial Sequence
  n-mer motif
ALGHQGN

SEQ ID NO: 7071 - protein, 7 aa, Artificial Sequence
  n-mer motif
LPRHDQY

SEQ ID NO: 7072 - protein, 7 aa, Artificial Sequence
  n-mer motif
ISGSSSL

SEQ ID NO: 7073 - protein, 7 aa, Artificial Sequence
  n-mer motif
WNTNMAI

SEQ ID NO: 7074 - protein, 7 aa, Artificial Sequence
  n-mer motif
MSDRTSD

SEQ ID NO: 7075 - protein, 7 aa, Artificial Sequence
  n-mer motif
TRESMSI

SEQ ID NO: 7076 - protein, 7 aa, Artificial Sequence
  n-mer motif
QRGELPA

SEQ ID NO: 7077 - protein, 7 aa, Artificial Sequence
  n-mer motif
SSDPKGQ

SEQ ID NO: 7078 - protein, 7 aa, Artificial Sequence
  n-mer motif
PSDRTTY

SEQ ID NO: 7079 - protein, 7 aa, Artificial Sequence
  n-mer motif
SSSDSPR

SEQ ID NO: 7080 - protein, 7 aa, Artificial Sequence
  n-mer motif
VLHSVSA

SEQ ID NO: 7081 - protein, 7 aa, Artificial Sequence
  n-mer motif
SMQSYTM

SEQ ID NO: 7082 - protein, 7 aa, Artificial Sequence
  n-mer motif
SLQLTAG

SEQ ID NO: 7083 - protein, 7 aa, Artificial Sequence
  n-mer motif
NNVNPYS

SEQ ID NO: 7084 - protein, 7 aa, Artificial Sequence
  n-mer motif
LANGMTA

SEQ ID NO: 7085 - protein, 7 aa, Artificial Sequence
  n-mer motif
GITGSTG

SEQ ID NO: 7086 - protein, 7 aa, Artificial Sequence
  n-mer motif
MLVQNTP

SEQ ID NO: 7087 - protein, 7 aa, Artificial Sequence
  n-mer motif
DANAGTR

SEQ ID NO: 7088 - protein, 7 aa, Artificial Sequence
  n-mer motif
ETGAMTS

SEQ ID NO: 7089 - protein, 7 aa, Artificial Sequence
  n-mer motif
IQTTTKC

SEQ ID NO: 7090 - protein, 7 aa, Artificial Sequence
  n-mer motif
AQQSLHG

SEQ ID NO: 7091 - protein, 7 aa, Artificial Sequence
  n-mer motif
IDSTWNT

SEQ ID NO: 7092 - protein, 7 aa, Artificial Sequence
  n-mer motif
TESQTMR

SEQ ID NO: 7093 - protein, 7 aa, Artificial Sequence
  n-mer motif
LIQTQGT

SEQ ID NO: 7094 - protein, 7 aa, Artificial Sequence
  n-mer motif
IVNITQS

SEQ ID NO: 7095 - protein, 7 aa, Artificial Sequence
  n-mer motif
VAVSNTP

SEQ ID NO: 7096 - protein, 7 aa, Artificial Sequence
  n-mer motif
GHRDSGG

SEQ ID NO: 7097 - protein, 7 aa, Artificial Sequence
  n-mer motif
RNENLNN

SEQ ID NO: 7098 - protein, 7 aa, Artificial Sequence
  n-mer motif
VMQRSAQ

SEQ ID NO: 7099 - protein, 7 aa, Artificial Sequence
  n-mer motif
VSGPVSV

SEQ ID NO: 7100 - protein, 7 aa, Artificial Sequence
  n-mer motif
GDIQSHS

SEQ ID NO: 7101 - protein, 7 aa, Artificial Sequence
  n-mer motif
VEKPLET

SEQ ID NO: 7102 - protein, 7 aa, Artificial Sequence
  n-mer motif
GVQMTAG

SEQ ID NO: 7103 - protein, 7 aa, Artificial Sequence
  n-mer motif
TTKTTSM

SEQ ID NO: 7104 - protein, 7 aa, Artificial Sequence
  n-mer motif
PGNPSSN

SEQ ID NO: 7105 - protein, 7 aa, Artificial Sequence
  n-mer motif
ASRPAAQ

SEQ ID NO: 7106 - protein, 7 aa, Artificial Sequence
  n-mer motif
VHDQGAG

SEQ ID NO: 7107 - protein, 7 aa, Artificial Sequence
  n-mer motif
SGSEYRT

SEQ ID NO: 7108 - protein, 7 aa, Artificial Sequence
  n-mer motif
YVDDNSR

SEQ ID NO: 7109 - protein, 7 aa, Artificial Sequence
  n-mer motif
MAGDQEL

SEQ ID NO: 7110 - protein, 7 aa, Artificial Sequence
  n-mer motif
PLHNIPP

SEQ ID NO: 7111 - protein, 7 aa, Artificial Sequence
  n-mer motif
SGIGTYS

SEQ ID NO: 7112 - protein, 7 aa, Artificial Sequence
  n-mer motif
SNADILA

SEQ ID NO: 7113 - protein, 7 aa, Artificial Sequence
  n-mer motif
SHNQVNV

SEQ ID NO: 7114 - protein, 7 aa, Artificial Sequence
  n-mer motif
QHSPKPV

SEQ ID NO: 7115 - protein, 7 aa, Artificial Sequence
  n-mer motif
SANNIAP

SEQ ID NO: 7116 - protein, 7 aa, Artificial Sequence
  n-mer motif
EETRTRM

SEQ ID NO: 7117 - protein, 7 aa, Artificial Sequence
  n-mer motif
LSNSITP

SEQ ID NO: 7118 - protein, 7 aa, Artificial Sequence
  n-mer motif
SALNSVD

SEQ ID NO: 7119 - protein, 7 aa, Artificial Sequence
  n-mer motif
TNLAVTL

SEQ ID NO: 7120 - protein, 7 aa, Artificial Sequence
  n-mer motif
QSTLNRP

SEQ ID NO: 7121 - protein, 7 aa, Artificial Sequence
  n-mer motif
IEHMLRP

SEQ ID NO: 7122 - protein, 7 aa, Artificial Sequence
  n-mer motif
PTPNEHM

SEQ ID NO: 7123 - protein, 7 aa, Artificial Sequence
  n-mer motif
INEIGRM

SEQ ID NO: 7124 - protein, 7 aa, Artificial Sequence
  n-mer motif
NNDNVYV

SEQ ID NO: 7125 - protein, 7 aa, Artificial Sequence
  n-mer motif
IVHTPQV

SEQ ID NO: 7126 - protein, 7 aa, Artificial Sequence
  n-mer motif
HKSESHN

SEQ ID NO: 7127 - protein, 7 aa, Artificial Sequence
  n-mer motif
SSSDSPR

SEQ ID NO: 7128 - protein, 7 aa, Artificial Sequence
  n-mer motif
YSTEARV

SEQ ID NO: 7129 - protein, 7 aa, Artificial Sequence
  n-mer motif
TSGDRYT

SEQ ID NO: 7130 - protein, 7 aa, Artificial Sequence
  n-mer motif
EKNLTNA

SEQ ID NO: 7131 - protein, 7 aa, Artificial Sequence
  n-mer motif
TRDQRST

SEQ ID NO: 7132 - protein, 7 aa, Artificial Sequence
  n-mer motif
ATDKMTP

SEQ ID NO: 7133 - protein, 7 aa, Artificial Sequence
  n-mer motif
NSYTAGK

SEQ ID NO: 7134 - protein, 7 aa, Artificial Sequence
  n-mer motif
TLDTKDL

SEQ ID NO: 7135 - protein, 7 aa, Artificial Sequence
  n-mer motif
ASNGQVN

SEQ ID NO: 7136 - protein, 7 aa, Artificial Sequence
  n-mer motif
TSISSQS

SEQ ID NO: 7137 - protein, 7 aa, Artificial Sequence
  n-mer motif
DNSPANH

SEQ ID NO: 7138 - protein, 7 aa, Artificial Sequence
  n-mer motif
NSREMGV

SEQ ID NO: 7139 - protein, 7 aa, Artificial Sequence
  n-mer motif
TSASENW

SEQ ID NO: 7140 - protein, 7 aa, Artificial Sequence
  n-mer motif
TVGSSYA

SEQ ID NO: 7141 - protein, 7 aa, Artificial Sequence
  n-mer motif
QQSQNSI

SEQ ID NO: 7142 - protein, 7 aa, Artificial Sequence
  n-mer motif
LRDGIAS

SEQ ID NO: 7143 - protein, 7 aa, Artificial Sequence
  n-mer motif
VQKTTAW

SEQ ID NO: 7144 - protein, 7 aa, Artificial Sequence
  n-mer motif
MSTVLRE

SEQ ID NO: 7145 - protein, 7 aa, Artificial Sequence
  n-mer motif
SMDARLT

SEQ ID NO: 7146 - protein, 7 aa, Artificial Sequence
  n-mer motif
GARTILD

SEQ ID NO: 7147 - protein, 7 aa, Artificial Sequence
  n-mer motif
HESHYVS

SEQ ID NO: 7148 - protein, 7 aa, Artificial Sequence
  n-mer motif
LEGQNKT

SEQ ID NO: 7149 - protein, 7 aa, Artificial Sequence
  n-mer motif
RDLRPVT

SEQ ID NO: 7150 - protein, 7 aa, Artificial Sequence
  n-mer motif
QILNYSV

SEQ ID NO: 7151 - protein, 7 aa, Artificial Sequence
  n-mer motif
ISVGVSV

SEQ ID NO: 7152 - protein, 7 aa, Artificial Sequence
  n-mer motif
KAGEYRD

SEQ ID NO: 7153 - protein, 7 aa, Artificial Sequence
  n-mer motif
LTTNGML

SEQ ID NO: 7154 - protein, 7 aa, Artificial Sequence
  n-mer motif
TSNYMHE

SEQ ID NO: 7155 - protein, 7 aa, Artificial Sequence
  n-mer motif
THNSTGL

SEQ ID NO: 7156 - protein, 7 aa, Artificial Sequence
  n-mer motif
NNVVRDD

SEQ ID NO: 7157 - protein, 7 aa, Artificial Sequence
  n-mer motif
SGTYASR

SEQ ID NO: 7158 - protein, 7 aa, Artificial Sequence
  n-mer motif
LSHAMDR

SEQ ID NO: 7159 - protein, 7 aa, Artificial Sequence
  n-mer motif
NWNSEGT

SEQ ID NO: 7160 - protein, 7 aa, Artificial Sequence
  n-mer motif
SLRPTLP

SEQ ID NO: 7161 - protein, 7 aa, Artificial Sequence
  n-mer motif
YQTGDKD

SEQ ID NO: 7162 - protein, 7 aa, Artificial Sequence
  n-mer motif
RSDKGTL

SEQ ID NO: 7163 - protein, 7 aa, Artificial Sequence
  n-mer motif
STIGNST

SEQ ID NO: 7164 - protein, 7 aa, Artificial Sequence
  n-mer motif
ENNMQHG

SEQ ID NO: 7165 - protein, 7 aa, Artificial Sequence
  n-mer motif
KYTESNA

SEQ ID NO: 7166 - protein, 7 aa, Artificial Sequence
  n-mer motif
PTNNLSM

SEQ ID NO: 7167 - protein, 7 aa, Artificial Sequence
  n-mer motif
CKNNSEC

SEQ ID NO: 7168 - protein, 7 aa, Artificial Sequence
  n-mer motif
TVNADGS

SEQ ID NO: 7169 - protein, 7 aa, Artificial Sequence
  n-mer motif
FSGQALA

SEQ ID NO: 7170 - protein, 7 aa, Artificial Sequence
  n-mer motif
NHIRNPM

SEQ ID NO: 7171 - protein, 7 aa, Artificial Sequence
  n-mer motif
MVNSENT

SEQ ID NO: 7172 - protein, 7 aa, Artificial Sequence
  n-mer motif
TDGPRLA

SEQ ID NO: 7173 - protein, 7 aa, Artificial Sequence
  n-mer motif
FNGYVMA

SEQ ID NO: 7174 - protein, 7 aa, Artificial Sequence
  n-mer motif
NANGPVS

SEQ ID NO: 7175 - protein, 7 aa, Artificial Sequence
  n-mer motif
STSQENR

SEQ ID NO: 7176 - protein, 7 aa, Artificial Sequence
  n-mer motif
QGTLLSP

SEQ ID NO: 7177 - protein, 7 aa, Artificial Sequence
  n-mer motif
LITATTN

SEQ ID NO: 7178 - protein, 7 aa, Artificial Sequence
  n-mer motif
SGVSKER

SEQ ID NO: 7179 - protein, 7 aa, Artificial Sequence
  n-mer motif
STSIGVV

SEQ ID NO: 7180 - protein, 7 aa, Artificial Sequence
  n-mer motif
SHVTVTD

SEQ ID NO: 7181 - protein, 7 aa, Artificial Sequence
  n-mer motif
SNNLNQE

SEQ ID NO: 7182 - protein, 7 aa, Artificial Sequence
  n-mer motif
ANHDNIV

SEQ ID NO: 7183 - protein, 7 aa, Artificial Sequence
  n-mer motif
DTSSGNR

SEQ ID NO: 7184 - protein, 7 aa, Artificial Sequence
  n-mer motif
VVPMPTT

SEQ ID NO: 7185 - protein, 7 aa, Artificial Sequence
  n-mer motif
LTNNFKD

SEQ ID NO: 7186 - protein, 7 aa, Artificial Sequence
  n-mer motif
SSPTKGT

SEQ ID NO: 7187 - protein, 7 aa, Artificial Sequence
  n-mer motif
DIPSDNT

SEQ ID NO: 7188 - protein, 7 aa, Artificial Sequence
  n-mer motif
YTGFELR

SEQ ID NO: 7189 - protein, 7 aa, Artificial Sequence
  n-mer motif
NSGNNPI

SEQ ID NO: 7190 - protein, 7 aa, Artificial Sequence
  n-mer motif
TTRNEHS

SEQ ID NO: 7191 - protein, 7 aa, Artificial Sequence
  n-mer motif
NVGNTLG

SEQ ID NO: 7192 - protein, 7 aa, Artificial Sequence
  n-mer motif
YHTHQVA

SEQ ID NO: 7193 - protein, 7 aa, Artificial Sequence
  n-mer motif
GSASNSG

SEQ ID NO: 7194 - protein, 7 aa, Artificial Sequence
  n-mer motif
GKNQPTP

SEQ ID NO: 7195 - protein, 7 aa, Artificial Sequence
  n-mer motif
FTATLGT

SEQ ID NO: 7196 - protein, 7 aa, Artificial Sequence
  n-mer motif
MNQMGGL

SEQ ID NO: 7197 - protein, 7 aa, Artificial Sequence
  n-mer motif
NVSLTQT

SEQ ID NO: 7198 - protein, 7 aa, Artificial Sequence
  n-mer motif
SSSNTNA

SEQ ID NO: 7199 - protein, 7 aa, Artificial Sequence
  n-mer motif
TNSNQSS

SEQ ID NO: 7200 - protein, 7 aa, Artificial Sequence
  n-mer motif
ISHDLKY

SEQ ID NO: 7201 - protein, 7 aa, Artificial Sequence
  n-mer motif
DSTYVLA

SEQ ID NO: 7202 - protein, 7 aa, Artificial Sequence
  n-mer motif
MNTGSSS

SEQ ID NO: 7203 - protein, 7 aa, Artificial Sequence
  n-mer motif
AGNYQSS

SEQ ID NO: 7204 - protein, 7 aa, Artificial Sequence
  n-mer motif
TIYNMGP

SEQ ID NO: 7205 - protein, 7 aa, Artificial Sequence
  n-mer motif
VSTTTDR

SEQ ID NO: 7206 - protein, 7 aa, Artificial Sequence
  n-mer motif
GVTVREL

SEQ ID NO: 7207 - protein, 7 aa, Artificial Sequence
  n-mer motif
DITNQSY

SEQ ID NO: 7208 - protein, 7 aa, Artificial Sequence
  n-mer motif
NQSLTMD

SEQ ID NO: 7209 - protein, 7 aa, Artificial Sequence
  n-mer motif
TNYNIGP

SEQ ID NO: 7210 - protein, 7 aa, Artificial Sequence
  n-mer motif
RGTEGTP

SEQ ID NO: 7211 - protein, 7 aa, Artificial Sequence
  n-mer motif
PITRESG

SEQ ID NO: 7212 - protein, 7 aa, Artificial Sequence
  n-mer motif
TGQAGGS

SEQ ID NO: 7213 - protein, 7 aa, Artificial Sequence
  n-mer motif
MTKHDAT

SEQ ID NO: 7214 - protein, 7 aa, Artificial Sequence
  n-mer motif
PIPHGSS

SEQ ID NO: 7215 - protein, 7 aa, Artificial Sequence
  n-mer motif
TTGGTGM

SEQ ID NO: 7216 - protein, 7 aa, Artificial Sequence
  n-mer motif
LTESVRN

SEQ ID NO: 7217 - protein, 7 aa, Artificial Sequence
  n-mer motif
SSNLTLS

SEQ ID NO: 7218 - protein, 7 aa, Artificial Sequence
  n-mer motif
LNNSATV

SEQ ID NO: 7219 - protein, 7 aa, Artificial Sequence
  n-mer motif
AYGSSGR

SEQ ID NO: 7220 - protein, 7 aa, Artificial Sequence
  n-mer motif
VSYDNGS

SEQ ID NO: 7221 - protein, 7 aa, Artificial Sequence
  n-mer motif
PSQSRSL

SEQ ID NO: 7222 - protein, 7 aa, Artificial Sequence
  n-mer motif
VLVNVHN

SEQ ID NO: 7223 - protein, 7 aa, Artificial Sequence
  n-mer motif
LMTGTAS

SEQ ID NO: 7224 - protein, 7 aa, Artificial Sequence
  n-mer motif
AAGNPTR

SEQ ID NO: 7225 - protein, 7 aa, Artificial Sequence
  n-mer motif
SAQSFVV

SEQ ID NO: 7226 - protein, 7 aa, Artificial Sequence
  n-mer motif
QDQTSNR

SEQ ID NO: 7227 - protein, 7 aa, Artificial Sequence
  n-mer motif
QSIGHPV

SEQ ID NO: 7228 - protein, 7 aa, Artificial Sequence
  n-mer motif
AGVRESF

SEQ ID NO: 7229 - protein, 7 aa, Artificial Sequence
  n-mer motif
NTNYAMH

SEQ ID NO: 7230 - protein, 7 aa, Artificial Sequence
  n-mer motif
ERSTHNV

SEQ ID NO: 7231 - protein, 7 aa, Artificial Sequence
  n-mer motif
MSGSMIS

SEQ ID NO: 7232 - protein, 7 aa, Artificial Sequence
  n-mer motif
SGQGFSA

SEQ ID NO: 7233 - protein, 7 aa, Artificial Sequence
  n-mer motif
TFTTLGK

SEQ ID NO: 7234 - protein, 7 aa, Artificial Sequence
  n-mer motif
DANAGTR

SEQ ID NO: 7235 - protein, 7 aa, Artificial Sequence
  n-mer motif
RDTAKGV

SEQ ID NO: 7236 - protein, 7 aa, Artificial Sequence
  n-mer motif
VRSGNKP

SEQ ID NO: 7237 - protein, 7 aa, Artificial Sequence
  n-mer motif
PQWGTDP

SEQ ID NO: 7238 - protein, 7 aa, Artificial Sequence
  n-mer motif
AFQNTGA

SEQ ID NO: 7239 - protein, 7 aa, Artificial Sequence
  n-mer motif
ATTQLMT

SEQ ID NO: 7240 - protein, 7 aa, Artificial Sequence
  n-mer motif
TNASEGS

SEQ ID NO: 7241 - protein, 7 aa, Artificial Sequence
  n-mer motif
MLTETKA

SEQ ID NO: 7242 - protein, 7 aa, Artificial Sequence
  n-mer motif
TNNLLAQ

SEQ ID NO: 7243 - protein, 7 aa, Artificial Sequence
  n-mer motif
DVLLKNF

SEQ ID NO: 7244 - protein, 7 aa, Artificial Sequence
  n-mer motif
YTPGLTE

SEQ ID NO: 7245 - protein, 7 aa, Artificial Sequence
  n-mer motif
RHASDAN

SEQ ID NO: 7246 - protein, 7 aa, Artificial Sequence
  n-mer motif
SKGDQLN

SEQ ID NO: 7247 - protein, 7 aa, Artificial Sequence
  n-mer motif
VLVTQNH

SEQ ID NO: 7248 - protein, 7 aa, Artificial Sequence
  n-mer motif
RQGDLKE

SEQ ID NO: 7249 - protein, 7 aa, Artificial Sequence
  n-mer motif
IQSQSQL

SEQ ID NO: 7250 - protein, 7 aa, Artificial Sequence
  n-mer motif
KIESGTI

SEQ ID NO: 7251 - protein, 7 aa, Artificial Sequence
  n-mer motif
TTLSQQS

SEQ ID NO: 7252 - protein, 7 aa, Artificial Sequence
  n-mer motif
FQLASNP

SEQ ID NO: 7253 - protein, 7 aa, Artificial Sequence
  n-mer motif
WISTEMR

SEQ ID NO: 7254 - protein, 7 aa, Artificial Sequence
  n-mer motif
AITITQK

SEQ ID NO: 7255 - protein, 7 aa, Artificial Sequence
  n-mer motif
VTGVDYA

SEQ ID NO: 7256 - protein, 7 aa, Artificial Sequence
  n-mer motif
IIASSTT

SEQ ID NO: 7257 - protein, 7 aa, Artificial Sequence
  n-mer motif
IYTNSHV

SEQ ID NO: 7258 - protein, 7 aa, Artificial Sequence
  n-mer motif
NDIPTRA

SEQ ID NO: 7259 - protein, 7 aa, Artificial Sequence
  n-mer motif
GVTNASK

SEQ ID NO: 7260 - protein, 7 aa, Artificial Sequence
  n-mer motif
RGNTLEM

SEQ ID NO: 7261 - protein, 7 aa, Artificial Sequence
  n-mer motif
GINHVAS

SEQ ID NO: 7262 - protein, 7 aa, Artificial Sequence
  n-mer motif
FNETAGR

SEQ ID NO: 7263 - protein, 7 aa, Artificial Sequence
  n-mer motif
ASQSEKN

SEQ ID NO: 7264 - protein, 7 aa, Artificial Sequence
  n-mer motif
ELNERNL

SEQ ID NO: 7265 - protein, 7 aa, Artificial Sequence
  n-mer motif
GEQSHNQ

SEQ ID NO: 7266 - protein, 7 aa, Artificial Sequence
  n-mer motif
LTNDNKL

SEQ ID NO: 7267 - protein, 7 aa, Artificial Sequence
  n-mer motif
SYGQGLE

SEQ ID NO: 7268 - protein, 7 aa, Artificial Sequence
  n-mer motif
HSDMGSS

SEQ ID NO: 7269 - protein, 7 aa, Artificial Sequence
  n-mer motif
ALKSDSA

SEQ ID NO: 7270 - protein, 7 aa, Artificial Sequence
  n-mer motif
TNLSPKT

SEQ ID NO: 7271 - protein, 7 aa, Artificial Sequence
  n-mer motif
ADTNIIV

SEQ ID NO: 7272 - protein, 7 aa, Artificial Sequence
  n-mer motif
SEGSSRS

SEQ ID NO: 7273 - protein, 7 aa, Artificial Sequence
  n-mer motif
NSSNTGW

SEQ ID NO: 7274 - protein, 7 aa, Artificial Sequence
  n-mer motif
VTNESRA

SEQ ID NO: 7275 - protein, 7 aa, Artificial Sequence
  n-mer motif
GRHTLAD

SEQ ID NO: 7276 - protein, 7 aa, Artificial Sequence
  n-mer motif
AVVNVAQ

SEQ ID NO: 7277 - protein, 6 aa, Artificial Sequence
  n-mer motif
KKPQQL

SEQ ID NO: 7278 - protein, 7 aa, Artificial Sequence
  n-mer motif
GNASGNP

SEQ ID NO: 7279 - protein, 7 aa, Artificial Sequence
  n-mer motif
FAAGAHG

SEQ ID NO: 7280 - protein, 7 aa, Artificial Sequence
  n-mer motif
GGNQNLT

SEQ ID NO: 7281 - protein, 7 aa, Artificial Sequence
  n-mer motif
HTQSTGY

SEQ ID NO: 7282 - protein, 7 aa, Artificial Sequence
  n-mer motif
LLGNAPT

SEQ ID NO: 7283 - protein, 7 aa, Artificial Sequence
  n-mer motif
EKGNSGV

SEQ ID NO: 7284 - protein, 7 aa, Artificial Sequence
  n-mer motif
GTEPRTA

SEQ ID NO: 7285 - protein, 7 aa, Artificial Sequence
  n-mer motif
MHAQESR

SEQ ID NO: 7286 - protein, 7 aa, Artificial Sequence
  n-mer motif
LISTGNN

SEQ ID NO: 7287 - protein, 7 aa, Artificial Sequence
  n-mer motif
KNNNSDS

SEQ ID NO: 7288 - protein, 7 aa, Artificial Sequence
  n-mer motif
GTLASMS

SEQ ID NO: 7289 - protein, 7 aa, Artificial Sequence
  n-mer motif
RIDTLLV

SEQ ID NO: 7290 - protein, 7 aa, Artificial Sequence
  n-mer motif
ISGSHLN

SEQ ID NO: 7291 - protein, 7 aa, Artificial Sequence
  n-mer motif
TVEGSYP

SEQ ID NO: 7292 - protein, 7 aa, Artificial Sequence
  n-mer motif
TEYLAGL

SEQ ID NO: 7293 - protein, 7 aa, Artificial Sequence
  n-mer motif
YLEGAHR

SEQ ID NO: 7294 - protein, 7 aa, Artificial Sequence
  n-mer motif
LSATSTM

SEQ ID NO: 7295 - protein, 7 aa, Artificial Sequence
  n-mer motif
MLSQVLT

SEQ ID NO: 7296 - protein, 7 aa, Artificial Sequence
  n-mer motif
ARNVMLG

SEQ ID NO: 7297 - protein, 7 aa, Artificial Sequence
  n-mer motif
LHGNFSQ

SEQ ID NO: 7298 - protein, 7 aa, Artificial Sequence
  n-mer motif
GHGSDLT

SEQ ID NO: 7299 - protein, 7 aa, Artificial Sequence
  n-mer motif
GVNYHTT

SEQ ID NO: 7300 - protein, 7 aa, Artificial Sequence
  n-mer motif
YLQTGTL

SEQ ID NO: 7301 - protein, 7 aa, Artificial Sequence
  n-mer motif
VNGGKPV

SEQ ID NO: 7302 - protein, 7 aa, Artificial Sequence
  n-mer motif
EVGKTTH

SEQ ID NO: 7303 - protein, 7 aa, Artificial Sequence
  n-mer motif
RPPNENR

SEQ ID NO: 7304 - protein, 7 aa, Artificial Sequence
  n-mer motif
VDKNHPL

SEQ ID NO: 7305 - protein, 7 aa, Artificial Sequence
  n-mer motif
SKSTEIM

SEQ ID NO: 7306 - protein, 7 aa, Artificial Sequence
  n-mer motif
TALLSNL

SEQ ID NO: 7307 - protein, 7 aa, Artificial Sequence
  n-mer motif
MHTSRPP

SEQ ID NO: 7308 - protein, 7 aa, Artificial Sequence
  n-mer motif
TPTNGNP

SEQ ID NO: 7309 - protein, 7 aa, Artificial Sequence
  n-mer motif
TTSVEKT

SEQ ID NO: 7310 - protein, 7 aa, Artificial Sequence
  n-mer motif
QYDASRQ

SEQ ID NO: 7311 - protein, 7 aa, Artificial Sequence
  n-mer motif
YNAHESF

SEQ ID NO: 7312 - protein, 7 aa, Artificial Sequence
  n-mer motif
DNQQALA

SEQ ID NO: 7313 - protein, 7 aa, Artificial Sequence
  n-mer motif
TKSFNDL

SEQ ID NO: 7314 - protein, 7 aa, Artificial Sequence
  n-mer motif
LADSNSK

SEQ ID NO: 7315 - protein, 7 aa, Artificial Sequence
  n-mer motif
PSTHGYV

SEQ ID NO: 7316 - protein, 7 aa, Artificial Sequence
  n-mer motif
QVQGTLG

SEQ ID NO: 7317 - protein, 7 aa, Artificial Sequence
  n-mer motif
LTAVAIS

SEQ ID NO: 7318 - protein, 7 aa, Artificial Sequence
  n-mer motif
RYESTSA

SEQ ID NO: 7319 - protein, 7 aa, Artificial Sequence
  n-mer motif
ADHNHIA

SEQ ID NO: 7320 - protein, 7 aa, Artificial Sequence
  n-mer motif
WNAENSK

SEQ ID NO: 7321 - protein, 7 aa, Artificial Sequence
  n-mer motif
NSVVGNI

SEQ ID NO: 7322 - protein, 7 aa, Artificial Sequence
  n-mer motif
FGATTTA

SEQ ID NO: 7323 - protein, 7 aa, Artificial Sequence
  n-mer motif
ASGSEMP

SEQ ID NO: 7324 - protein, 7 aa, Artificial Sequence
  n-mer motif
DGTKSGM

SEQ ID NO: 7325 - protein, 7 aa, Artificial Sequence
  n-mer motif
YTADKKQ

SEQ ID NO: 7326 - protein, 7 aa, Artificial Sequence
  n-mer motif
PIAERPS

SEQ ID NO: 7327 - protein, 7 aa, Artificial Sequence
  n-mer motif
SNSYLLN

SEQ ID NO: 7328 - protein, 7 aa, Artificial Sequence
  n-mer motif
TRELTKN

SEQ ID NO: 7329 - protein, 7 aa, Artificial Sequence
  n-mer motif
LGNHYTP

SEQ ID NO: 7330 - protein, 7 aa, Artificial Sequence
  n-mer motif
LLQSIVV

SEQ ID NO: 7331 - protein, 7 aa, Artificial Sequence
  n-mer motif
MMANNMQ

SEQ ID NO: 7332 - protein, 7 aa, Artificial Sequence
  n-mer motif
GADTSTR

SEQ ID NO: 7333 - protein, 7 aa, Artificial Sequence
  n-mer motif
GFGHVPE

SEQ ID NO: 7334 - protein, 7 aa, Artificial Sequence
  n-mer motif
NVMHSSS

SEQ ID NO: 7335 - protein, 7 aa, Artificial Sequence
  n-mer motif
SASKVEY

SEQ ID NO: 7336 - protein, 7 aa, Artificial Sequence
  n-mer motif
ISSYDGN

SEQ ID NO: 7337 - protein, 7 aa, Artificial Sequence
  n-mer motif
KKTKTLT

SEQ ID NO: 7338 - protein, 7 aa, Artificial Sequence
  n-mer motif
GTILPNQ

SEQ ID NO: 7339 - protein, 7 aa, Artificial Sequence
  n-mer motif
LNVVPTQ

SEQ ID NO: 7340 - protein, 7 aa, Artificial Sequence
  n-mer motif
SSVTSRE

SEQ ID NO: 7341 - protein, 7 aa, Artificial Sequence
  n-mer motif
PINVLTT

SEQ ID NO: 7342 - protein, 7 aa, Artificial Sequence
  n-mer motif
GDKASLA

SEQ ID NO: 7343 - protein, 7 aa, Artificial Sequence
  n-mer motif
RMSESSD

SEQ ID NO: 7344 - protein, 7 aa, Artificial Sequence
  n-mer motif
NLLTSSP

SEQ ID NO: 7345 - protein, 7 aa, Artificial Sequence
  n-mer motif
SRLSQDP

SEQ ID NO: 7346 - protein, 7 aa, Artificial Sequence
  n-mer motif
WSNAQSP

SEQ ID NO: 7347 - protein, 7 aa, Artificial Sequence
  n-mer motif
GRHLQSD

SEQ ID NO: 7348 - protein, 7 aa, Artificial Sequence
  n-mer motif
MSLASTQ

SEQ ID NO: 7349 - protein, 7 aa, Artificial Sequence
  n-mer motif
MSTVLRE

SEQ ID NO: 7350 - protein, 7 aa, Artificial Sequence
  n-mer motif
SKSENLQ

SEQ ID NO: 7351 - protein, 7 aa, Artificial Sequence
  n-mer motif
WTEGGSG

SEQ ID NO: 7352 - protein, 7 aa, Artificial Sequence
  n-mer motif
STTVWTA

SEQ ID NO: 7353 - protein, 7 aa, Artificial Sequence
  n-mer motif
VSLESRL

SEQ ID NO: 7354 - protein, 7 aa, Artificial Sequence
  n-mer motif
SMYGQAG

SEQ ID NO: 7355 - protein, 7 aa, Artificial Sequence
  n-mer motif
TNTQNNP

SEQ ID NO: 7356 - protein, 7 aa, Artificial Sequence
  n-mer motif
VGDRNLV

SEQ ID NO: 7357 - protein, 7 aa, Artificial Sequence
  n-mer motif
LAHNYLS

SEQ ID NO: 7358 - protein, 7 aa, Artificial Sequence
  n-mer motif
WTANQGL

SEQ ID NO: 7359 - protein, 7 aa, Artificial Sequence
  n-mer motif
VFREGIV

SEQ ID NO: 7360 - protein, 7 aa, Artificial Sequence
  n-mer motif
QVQHERV

SEQ ID NO: 7361 - protein, 7 aa, Artificial Sequence
  n-mer motif
QILNYSV

SEQ ID NO: 7362 - protein, 7 aa, Artificial Sequence
  n-mer motif
STIGNST

SEQ ID NO: 7363 - protein, 7 aa, Artificial Sequence
  n-mer motif
PIHHGSS

SEQ ID NO: 7364 - protein, 7 aa, Artificial Sequence
  n-mer motif
IATNVIY

SEQ ID NO: 7365 - protein, 7 aa, Artificial Sequence
  n-mer motif
QGGTNNP

SEQ ID NO: 7366 - protein, 7 aa, Artificial Sequence
  n-mer motif
TRGNDIS

SEQ ID NO: 7367 - protein, 7 aa, Artificial Sequence
  n-mer motif
QTLIVGS

SEQ ID NO: 7368 - protein, 7 aa, Artificial Sequence
  n-mer motif
RGLPDVN

SEQ ID NO: 7369 - protein, 7 aa, Artificial Sequence
  n-mer motif
LNVNTLN

SEQ ID NO: 7370 - protein, 7 aa, Artificial Sequence
  n-mer motif
GTKSWPV

SEQ ID NO: 7371 - protein, 7 aa, Artificial Sequence
  n-mer motif
THLVSDS

SEQ ID NO: 7372 - protein, 7 aa, Artificial Sequence
  n-mer motif
WTGAQPS

SEQ ID NO: 7373 - protein, 7 aa, Artificial Sequence
  n-mer motif
SAMHTLV

SEQ ID NO: 7374 - protein, 7 aa, Artificial Sequence
  n-mer motif
SQHHTPL

SEQ ID NO: 7375 - protein, 7 aa, Artificial Sequence
  n-mer motif
DNRMEAT

SEQ ID NO: 7376 - protein, 7 aa, Artificial Sequence
  n-mer motif
LGGTLGI

SEQ ID NO: 7377 - protein, 7 aa, Artificial Sequence
  n-mer motif
FHNESYG

SEQ ID NO: 7378 - protein, 7 aa, Artificial Sequence
  n-mer motif
IRTSVIN

SEQ ID NO: 7379 - protein, 7 aa, Artificial Sequence
  n-mer motif
YNTVDQR

SEQ ID NO: 7380 - protein, 7 aa, Artificial Sequence
  n-mer motif
AHQTAGP

SEQ ID NO: 7381 - protein, 7 aa, Artificial Sequence
  n-mer motif
PPESARG

SEQ ID NO: 7382 - protein, 7 aa, Artificial Sequence
  n-mer motif
NNTLNIL

SEQ ID NO: 7383 - protein, 7 aa, Artificial Sequence
  n-mer motif
ASYSSMV

SEQ ID NO: 7384 - protein, 7 aa, Artificial Sequence
  n-mer motif
SGQNGTS

SEQ ID NO: 7385 - protein, 7 aa, Artificial Sequence
  n-mer motif
LSSMSTD

SEQ ID NO: 7386 - protein, 7 aa, Artificial Sequence
  n-mer motif
VASMVHN

SEQ ID NO: 7387 - protein, 7 aa, Artificial Sequence
  n-mer motif
TQLSDGC

SEQ ID NO: 7388 - protein, 7 aa, Artificial Sequence
  n-mer motif
AIVDRGS

SEQ ID NO: 7389 - protein, 7 aa, Artificial Sequence
  n-mer motif
NRQRDFE

SEQ ID NO: 7390 - protein, 7 aa, Artificial Sequence
  n-mer motif
AHQKDIR

SEQ ID NO: 7391 - protein, 7 aa, Artificial Sequence
  n-mer motif
FTERALQ

SEQ ID NO: 7392 - protein, 7 aa, Artificial Sequence
  n-mer motif
MLSHGAL

SEQ ID NO: 7393 - protein, 7 aa, Artificial Sequence
  n-mer motif
SVTNGAE

SEQ ID NO: 7394 - protein, 7 aa, Artificial Sequence
  n-mer motif
ITAASPQ

SEQ ID NO: 7395 - protein, 7 aa, Artificial Sequence
  n-mer motif
QNTQRYL

SEQ ID NO: 7396 - protein, 7 aa, Artificial Sequence
  n-mer motif
TGQGFSA

SEQ ID NO: 7397 - protein, 7 aa, Artificial Sequence
  n-mer motif
SFEKNGI

SEQ ID NO: 7398 - protein, 7 aa, Artificial Sequence
  n-mer motif
LTSHSAG

SEQ ID NO: 7399 - protein, 7 aa, Artificial Sequence
  n-mer motif
STIGNST

SEQ ID NO: 7400 - protein, 7 aa, Artificial Sequence
  n-mer motif
GLSRNDG

SEQ ID NO: 7401 - protein, 7 aa, Artificial Sequence
  n-mer motif
STTHPSE

SEQ ID NO: 7402 - protein, 7 aa, Artificial Sequence
  n-mer motif
PSTNESR

SEQ ID NO: 7403 - protein, 7 aa, Artificial Sequence
  n-mer motif
GTKDILI

SEQ ID NO: 7404 - protein, 7 aa, Artificial Sequence
  n-mer motif
STINMRA

SEQ ID NO: 7405 - protein, 7 aa, Artificial Sequence
  n-mer motif
YIAGGEQ

SEQ ID NO: 7406 - protein, 7 aa, Artificial Sequence
  n-mer motif
SSGQPLV

SEQ ID NO: 7407 - protein, 7 aa, Artificial Sequence
  n-mer motif
DKQQTGQ

SEQ ID NO: 7408 - protein, 7 aa, Artificial Sequence
  n-mer motif
GLGQPQL

SEQ ID NO: 7409 - protein, 7 aa, Artificial Sequence
  n-mer motif
SPQHGVI

SEQ ID NO: 7410 - protein, 7 aa, Artificial Sequence
  n-mer motif
YRGREDW

SEQ ID NO: 7411 - protein, 7 aa, Artificial Sequence
  n-mer motif
AGGLLSR

SEQ ID NO: 7412 - protein, 7 aa, Artificial Sequence
  n-mer motif
PIQQASL

SEQ ID NO: 7413 - protein, 7 aa, Artificial Sequence
  n-mer motif
WSAGERV

SEQ ID NO: 7414 - protein, 7 aa, Artificial Sequence
  n-mer motif
RGDVATT

SEQ ID NO: 7415 - protein, 7 aa, Artificial Sequence
  n-mer motif
LTGQNEF

SEQ ID NO: 7416 - protein, 7 aa, Artificial Sequence
  n-mer motif
TTPPFSN

SEQ ID NO: 7417 - protein, 7 aa, Artificial Sequence
  n-mer motif
TSIGSAK

SEQ ID NO: 7418 - protein, 7 aa, Artificial Sequence
  n-mer motif
NVQNVPG

SEQ ID NO: 7419 - protein, 7 aa, Artificial Sequence
  n-mer motif
YTGTLVV

SEQ ID NO: 7420 - protein, 7 aa, Artificial Sequence
  n-mer motif
GTHASAY

SEQ ID NO: 7421 - protein, 7 aa, Artificial Sequence
  n-mer motif
LVVSNSL

SEQ ID NO: 7422 - protein, 7 aa, Artificial Sequence
  n-mer motif
THLVRDS

SEQ ID NO: 7423 - protein, 7 aa, Artificial Sequence
  n-mer motif
NHGRAID

SEQ ID NO: 7424 - protein, 7 aa, Artificial Sequence
  n-mer motif
PKTLTST

SEQ ID NO: 7425 - protein, 7 aa, Artificial Sequence
  n-mer motif
FGIGHGT

SEQ ID NO: 7426 - protein, 7 aa, Artificial Sequence
  n-mer motif
ALPSRER

SEQ ID NO: 7427 - protein, 7 aa, Artificial Sequence
  n-mer motif
ATRGESS

SEQ ID NO: 7428 - protein, 7 aa, Artificial Sequence
  n-mer motif
GTTEVNK

SEQ ID NO: 7429 - protein, 7 aa, Artificial Sequence
  n-mer motif
THTLGGT

SEQ ID NO: 7430 - protein, 7 aa, Artificial Sequence
  n-mer motif
EAVTSKW

SEQ ID NO: 7431 - protein, 7 aa, Artificial Sequence
  n-mer motif
HYGNKDI

SEQ ID NO: 7432 - protein, 7 aa, Artificial Sequence
  n-mer motif
ISTHTMT

SEQ ID NO: 7433 - protein, 7 aa, Artificial Sequence
  n-mer motif
DTYNSNT

SEQ ID NO: 7434 - protein, 7 aa, Artificial Sequence
  n-mer motif
VFTGQTE

SEQ ID NO: 7435 - protein, 7 aa, Artificial Sequence
  n-mer motif
SVTSGTQ

SEQ ID NO: 7436 - protein, 7 aa, Artificial Sequence
  n-mer motif
HTYSQAD

SEQ ID NO: 7437 - protein, 7 aa, Artificial Sequence
  n-mer motif
VAGLVDI

SEQ ID NO: 7438 - protein, 7 aa, Artificial Sequence
  n-mer motif
DSTKAMQ

SEQ ID NO: 7439 - protein, 7 aa, Artificial Sequence
  n-mer motif
EGHNRGI

SEQ ID NO: 7440 - protein, 7 aa, Artificial Sequence
  n-mer motif
GLHGTSN

SEQ ID NO: 7441 - protein, 7 aa, Artificial Sequence
  n-mer motif
PLSLHNS

SEQ ID NO: 7442 - protein, 7 aa, Artificial Sequence
  n-mer motif
ASDKGAN

SEQ ID NO: 7443 - protein, 7 aa, Artificial Sequence
  n-mer motif
VLLQNSH

SEQ ID NO: 7444 - protein, 7 aa, Artificial Sequence
  n-mer motif
LYDGKHV

SEQ ID NO: 7445 - protein, 7 aa, Artificial Sequence
  n-mer motif
TQGSNTT

SEQ ID NO: 7446 - protein, 7 aa, Artificial Sequence
  n-mer motif
FLDKYNY

SEQ ID NO: 7447 - protein, 7 aa, Artificial Sequence
  n-mer motif
DTGIKNV

SEQ ID NO: 7448 - protein, 7 aa, Artificial Sequence
  n-mer motif
SGAAQNP

SEQ ID NO: 7449 - protein, 7 aa, Artificial Sequence
  n-mer motif
TLHTKDL

SEQ ID NO: 7450 - protein, 7 aa, Artificial Sequence
  n-mer motif
ATYVVGT

SEQ ID NO: 7451 - protein, 7 aa, Artificial Sequence
  n-mer motif
LVGTLVY

SEQ ID NO: 7452 - protein, 7 aa, Artificial Sequence
  n-mer motif
SNTTVQL

SEQ ID NO: 7453 - protein, 7 aa, Artificial Sequence
  n-mer motif
KAQINQM

SEQ ID NO: 7454 - protein, 7 aa, Artificial Sequence
  n-mer motif
RNATVTV

SEQ ID NO: 7455 - protein, 7 aa, Artificial Sequence
  n-mer motif
ATRVGNH

SEQ ID NO: 7456 - protein, 7 aa, Artificial Sequence
  n-mer motif
SYQNPPP

SEQ ID NO: 7457 - protein, 7 aa, Artificial Sequence
  n-mer motif
FDSYNIV

SEQ ID NO: 7458 - protein, 7 aa, Artificial Sequence
  n-mer motif
ATLSPHA

SEQ ID NO: 7459 - protein, 7 aa, Artificial Sequence
  n-mer motif
WESPTNA

SEQ ID NO: 7460 - protein, 7 aa, Artificial Sequence
  n-mer motif
IENVNHL

SEQ ID NO: 7461 - protein, 7 aa, Artificial Sequence
  n-mer motif
YRASDVA

SEQ ID NO: 7462 - protein, 7 aa, Artificial Sequence
  n-mer motif
HMSSVAT

SEQ ID NO: 7463 - protein, 7 aa, Artificial Sequence
  n-mer motif
IQRDVGH

SEQ ID NO: 7464 - protein, 7 aa, Artificial Sequence
  n-mer motif
ESVRETI

SEQ ID NO: 7465 - protein, 7 aa, Artificial Sequence
  n-mer motif
QGGNSRF

SEQ ID NO: 7466 - protein, 7 aa, Artificial Sequence
  n-mer motif
EKGTPSS

SEQ ID NO: 7467 - protein, 7 aa, Artificial Sequence
  n-mer motif
HDSTTRP

SEQ ID NO: 7468 - protein, 7 aa, Artificial Sequence
  n-mer motif
LPTGVLP

SEQ ID NO: 7469 - protein, 7 aa, Artificial Sequence
  n-mer motif
TLGYPDK

SEQ ID NO: 7470 - protein, 7 aa, Artificial Sequence
  n-mer motif
ANTVTER

SEQ ID NO: 7471 - protein, 7 aa, Artificial Sequence
  n-mer motif
HDKSIQP

SEQ ID NO: 7472 - protein, 7 aa, Artificial Sequence
  n-mer motif
GGTALGS

SEQ ID NO: 7473 - protein, 7 aa, Artificial Sequence
  n-mer motif
GGNYHTT

SEQ ID NO: 7474 - protein, 7 aa, Artificial Sequence
  n-mer motif
ISEMTRY

SEQ ID NO: 7475 - protein, 7 aa, Artificial Sequence
  n-mer motif
VESKSEP

SEQ ID NO: 7476 - protein, 7 aa, Artificial Sequence
  n-mer motif
DRAQNNE

SEQ ID NO: 7477 - protein, 7 aa, Artificial Sequence
  n-mer motif
TAQTGWV

SEQ ID NO: 7478 - protein, 7 aa, Artificial Sequence
  n-mer motif
GFGHLPE

SEQ ID NO: 7479 - protein, 7 aa, Artificial Sequence
  n-mer motif
PITGFSV

SEQ ID NO: 7480 - protein, 7 aa, Artificial Sequence
  n-mer motif
DRTYSNT

SEQ ID NO: 7481 - protein, 7 aa, Artificial Sequence
  n-mer motif
MSNASYI

SEQ ID NO: 7482 - protein, 7 aa, Artificial Sequence
  n-mer motif
DNSRPEV

SEQ ID NO: 7483 - protein, 7 aa, Artificial Sequence
  n-mer motif
SSSQTVL

SEQ ID NO: 7484 - protein, 7 aa, Artificial Sequence
  n-mer motif
SNLDGTI

SEQ ID NO: 7485 - protein, 7 aa, Artificial Sequence
  n-mer motif
SNMREEI

SEQ ID NO: 7486 - protein, 7 aa, Artificial Sequence
  n-mer motif
RLTELVI

SEQ ID NO: 7487 - protein, 7 aa, Artificial Sequence
  n-mer motif
QVSLVKL

SEQ ID NO: 7488 - protein, 7 aa, Artificial Sequence
  n-mer motif
EIHTTTG

SEQ ID NO: 7489 - protein, 7 aa, Artificial Sequence
  n-mer motif
SRIENNN

SEQ ID NO: 7490 - protein, 7 aa, Artificial Sequence
  n-mer motif
GTGKEVR

SEQ ID NO: 7491 - protein, 7 aa, Artificial Sequence
  n-mer motif
WQDHNKV

SEQ ID NO: 7492 - protein, 7 aa, Artificial Sequence
  n-mer motif
STNSIGA

SEQ ID NO: 7493 - protein, 7 aa, Artificial Sequence
  n-mer motif
SELMVRP

SEQ ID NO: 7494 - protein, 7 aa, Artificial Sequence
  n-mer motif
PLQNNKT

SEQ ID NO: 7495 - protein, 7 aa, Artificial Sequence
  n-mer motif
PYANRLE

SEQ ID NO: 7496 - protein, 7 aa, Artificial Sequence
  n-mer motif
GTVSLIP

SEQ ID NO: 7497 - protein, 7 aa, Artificial Sequence
  n-mer motif
DVYLKSP

SEQ ID NO: 7498 - protein, 7 aa, Artificial Sequence
  n-mer motif
LPDKGRI

SEQ ID NO: 7499 - protein, 7 aa, Artificial Sequence
  n-mer motif
SITTVAN

SEQ ID NO: 7500 - protein, 7 aa, Artificial Sequence
  n-mer motif
PLQSQSG

SEQ ID NO: 7501 - protein, 7 aa, Artificial Sequence
  n-mer motif
NNMGHGH

SEQ ID NO: 7502 - protein, 7 aa, Artificial Sequence
  n-mer motif
SGQKNSE

SEQ ID NO: 7503 - protein, 7 aa, Artificial Sequence
  n-mer motif
TEAGRPQ

SEQ ID NO: 7504 - protein, 7 aa, Artificial Sequence
  n-mer motif
TLHTKDL

SEQ ID NO: 7505 - protein, 7 aa, Artificial Sequence
  n-mer motif
LRDLNGG

SEQ ID NO: 7506 - protein, 7 aa, Artificial Sequence
  n-mer motif
VCVTTCA

SEQ ID NO: 7507 - protein, 7 aa, Artificial Sequence
  n-mer motif
VTAAQPQ

SEQ ID NO: 7508 - protein, 7 aa, Artificial Sequence
  n-mer motif
ATFSHAG

SEQ ID NO: 7509 - protein, 7 aa, Artificial Sequence
  n-mer motif
TYAPRSP

SEQ ID NO: 7510 - protein, 7 aa, Artificial Sequence
  n-mer motif
TSEMRTA

SEQ ID NO: 7511 - protein, 7 aa, Artificial Sequence
  n-mer motif
YSTTMLN

SEQ ID NO: 7512 - protein, 7 aa, Artificial Sequence
  n-mer motif
SFTNTNP

SEQ ID NO: 7513 - protein, 7 aa, Artificial Sequence
  n-mer motif
SPPSTSG

SEQ ID NO: 7514 - protein, 7 aa, Artificial Sequence
  n-mer motif
VTTVDSA

SEQ ID NO: 7515 - protein, 7 aa, Artificial Sequence
  n-mer motif
EAHNRVI

SEQ ID NO: 7516 - protein, 7 aa, Artificial Sequence
  n-mer motif
MELTSTS

SEQ ID NO: 7517 - protein, 7 aa, Artificial Sequence
  n-mer motif
HLVTSGI

SEQ ID NO: 7518 - protein, 7 aa, Artificial Sequence
  n-mer motif
QTITSQM

SEQ ID NO: 7519 - protein, 7 aa, Artificial Sequence
  n-mer motif
TANSTYV

SEQ ID NO: 7520 - protein, 7 aa, Artificial Sequence
  n-mer motif
LIQLSGQ

SEQ ID NO: 7521 - protein, 7 aa, Artificial Sequence
  n-mer motif
SYVSVPA

SEQ ID NO: 7522 - protein, 7 aa, Artificial Sequence
  n-mer motif
VHGNAPA

SEQ ID NO: 7523 - protein, 7 aa, Artificial Sequence
  n-mer motif
AGKTHAD

SEQ ID NO: 7524 - protein, 7 aa, Artificial Sequence
  n-mer motif
TFHQGVK

SEQ ID NO: 7525 - protein, 7 aa, Artificial Sequence
  n-mer motif
LGNNRPL

SEQ ID NO: 7526 - protein, 7 aa, Artificial Sequence
  n-mer motif
LHLVRSF

SEQ ID NO: 7527 - protein, 7 aa, Artificial Sequence
  n-mer motif
SYSTSTP

SEQ ID NO: 7528 - protein, 7 aa, Artificial Sequence
  n-mer motif
ISQGSSL

SEQ ID NO: 7529 - protein, 7 aa, Artificial Sequence
  n-mer motif
LQLATSH

SEQ ID NO: 7530 - protein, 7 aa, Artificial Sequence
  n-mer motif
VTQRFAE

SEQ ID NO: 7531 - protein, 7 aa, Artificial Sequence
  n-mer motif
AIDSIKM

SEQ ID NO: 7532 - protein, 7 aa, Artificial Sequence
  n-mer motif
DAHTFSR

SEQ ID NO: 7533 - protein, 7 aa, Artificial Sequence
  n-mer motif
RGSDGGL

SEQ ID NO: 7534 - protein, 7 aa, Artificial Sequence
  n-mer motif
LAQGTDR

SEQ ID NO: 7535 - protein, 7 aa, Artificial Sequence
  n-mer motif
KNNNSDS

SEQ ID NO: 7536 - protein, 7 aa, Artificial Sequence
  n-mer motif
ENEKRES

SEQ ID NO: 7537 - protein, 7 aa, Artificial Sequence
  n-mer motif
NEQFEKV

SEQ ID NO: 7538 - protein, 7 aa, Artificial Sequence
  n-mer motif
TQVVART

SEQ ID NO: 7539 - protein, 7 aa, Artificial Sequence
  n-mer motif
GVNVTNS

SEQ ID NO: 7540 - protein, 7 aa, Artificial Sequence
  n-mer motif
ADKGFGH

SEQ ID NO: 7541 - protein, 7 aa, Artificial Sequence
  n-mer motif
THKQVDL

SEQ ID NO: 7542 - protein, 7 aa, Artificial Sequence
  n-mer motif
SANLYKQ

SEQ ID NO: 7543 - protein, 7 aa, Artificial Sequence
  n-mer motif
KLHTKDL

SEQ ID NO: 7544 - protein, 7 aa, Artificial Sequence
  n-mer motif
VVVHTIP

SEQ ID NO: 7545 - protein, 7 aa, Artificial Sequence
  n-mer motif
STSQAVQ

SEQ ID NO: 7546 - protein, 7 aa, Artificial Sequence
  n-mer motif
RNGSAQS

SEQ ID NO: 7547 - protein, 7 aa, Artificial Sequence
  n-mer motif
HYGNKDI

SEQ ID NO: 7548 - protein, 7 aa, Artificial Sequence
  n-mer motif
SFLVAHP

SEQ ID NO: 7549 - protein, 7 aa, Artificial Sequence
  n-mer motif
QQNTSLP

SEQ ID NO: 7550 - protein, 7 aa, Artificial Sequence
  n-mer motif
MHVDKTS

SEQ ID NO: 7551 - protein, 7 aa, Artificial Sequence
  n-mer motif
NNENTRN

SEQ ID NO: 7552 - protein, 7 aa, Artificial Sequence
  n-mer motif
SINNIGA

SEQ ID NO: 7553 - protein, 7 aa, Artificial Sequence
  n-mer motif
ATISDRA

SEQ ID NO: 7554 - protein, 7 aa, Artificial Sequence
  n-mer motif
YSNLVLS

SEQ ID NO: 7555 - protein, 7 aa, Artificial Sequence
  n-mer motif
MMNVSGH

SEQ ID NO: 7556 - protein, 7 aa, Artificial Sequence
  n-mer motif
GETRSTA

SEQ ID NO: 7557 - protein, 7 aa, Artificial Sequence
  n-mer motif
TKGYNDL

SEQ ID NO: 7558 - protein, 7 aa, Artificial Sequence
  n-mer motif
AYNMSSV

SEQ ID NO: 7559 - protein, 7 aa, Artificial Sequence
  n-mer motif
ADPAKGK

SEQ ID NO: 7560 - protein, 7 aa, Artificial Sequence
  n-mer motif
YISAPPM

SEQ ID NO: 7561 - protein, 7 aa, Artificial Sequence
  n-mer motif
RNNPSHD

SEQ ID NO: 7562 - protein, 7 aa, Artificial Sequence
  n-mer motif
GTSIDYV

SEQ ID NO: 7563 - protein, 7 aa, Artificial Sequence
  n-mer motif
GTGYPNQ

SEQ ID NO: 7564 - protein, 7 aa, Artificial Sequence
  n-mer motif
DHMNLRS

SEQ ID NO: 7565 - protein, 7 aa, Artificial Sequence
  n-mer motif
INSYLHE

SEQ ID NO: 7566 - protein, 7 aa, Artificial Sequence
  n-mer motif
WQMGAGS

SEQ ID NO: 7567 - protein, 7 aa, Artificial Sequence
  n-mer motif
MGIGSYK

SEQ ID NO: 7568 - protein, 7 aa, Artificial Sequence
  n-mer motif
QNHNELK

SEQ ID NO: 7569 - protein, 7 aa, Artificial Sequence
  n-mer motif
DKSNYSI

SEQ ID NO: 7570 - protein, 7 aa, Artificial Sequence
  n-mer motif
TTKPVAE

SEQ ID NO: 7571 - protein, 7 aa, Artificial Sequence
  n-mer motif
VTVSNSL

SEQ ID NO: 7572 - protein, 7 aa, Artificial Sequence
  n-mer motif
TAYLDGL

SEQ ID NO: 7573 - protein, 7 aa, Artificial Sequence
  n-mer motif
NLQTGVQ

SEQ ID NO: 7574 - protein, 7 aa, Artificial Sequence
  n-mer motif
TVAPYSS

SEQ ID NO: 7575 - protein, 7 aa, Artificial Sequence
  n-mer motif
VQISMNN

SEQ ID NO: 7576 - protein, 7 aa, Artificial Sequence
  n-mer motif
YIAGGEQ

SEQ ID NO: 7577 - protein, 7 aa, Artificial Sequence
  n-mer motif
FMEVMKN

SEQ ID NO: 7578 - protein, 7 aa, Artificial Sequence
  n-mer motif
TTDKGIN

SEQ ID NO: 7579 - protein, 7 aa, Artificial Sequence
  n-mer motif
LSYSIQH

SEQ ID NO: 7580 - protein, 7 aa, Artificial Sequence
  n-mer motif
AYNARLP

SEQ ID NO: 7581 - protein, 7 aa, Artificial Sequence
  n-mer motif
NTGTTSV

SEQ ID NO: 7582 - protein, 7 aa, Artificial Sequence
  n-mer motif
VLSTGLR

SEQ ID NO: 7583 - protein, 7 aa, Artificial Sequence
  n-mer motif
NDSSSMS

SEQ ID NO: 7584 - protein, 7 aa, Artificial Sequence
  n-mer motif
RQGSLMI

SEQ ID NO: 7585 - protein, 7 aa, Artificial Sequence
  n-mer motif
ISTAYML

SEQ ID NO: 7586 - protein, 7 aa, Artificial Sequence
  n-mer motif
GTMNIGI

SEQ ID NO: 7587 - protein, 7 aa, Artificial Sequence
  n-mer motif
HNNNLLN

SEQ ID NO: 7588 - protein, 7 aa, Artificial Sequence
  n-mer motif
HFSQITN

SEQ ID NO: 7589 - protein, 7 aa, Artificial Sequence
  n-mer motif
DLTRAAI

SEQ ID NO: 7590 - protein, 7 aa, Artificial Sequence
  n-mer motif
VAMGGGP

SEQ ID NO: 7591 - protein, 7 aa, Artificial Sequence
  n-mer motif
AYGIREV

SEQ ID NO: 7592 - protein, 7 aa, Artificial Sequence
  n-mer motif
TSDGLLS

SEQ ID NO: 7593 - protein, 7 aa, Artificial Sequence
  n-mer motif
TMATNLS

SEQ ID NO: 7594 - protein, 7 aa, Artificial Sequence
  n-mer motif
NNGNSSR

SEQ ID NO: 7595 - protein, 7 aa, Artificial Sequence
  n-mer motif
TEKASPL

SEQ ID NO: 7596 - protein, 7 aa, Artificial Sequence
  n-mer motif
LNHTMPL

SEQ ID NO: 7597 - protein, 7 aa, Artificial Sequence
  n-mer motif
DTASYNN

SEQ ID NO: 7598 - protein, 7 aa, Artificial Sequence
  n-mer motif
NMTNERL

SEQ ID NO: 7599 - protein, 7 aa, Artificial Sequence
  n-mer motif
VVSSGGW

SEQ ID NO: 7600 - protein, 7 aa, Artificial Sequence
  n-mer motif
VNQSPGA

SEQ ID NO: 7601 - protein, 7 aa, Artificial Sequence
  n-mer motif
DHHPQSR

SEQ ID NO: 7602 - protein, 7 aa, Artificial Sequence
  n-mer motif
RWQGLSA

SEQ ID NO: 7603 - protein, 7 aa, Artificial Sequence
  n-mer motif
AVTTSVR

SEQ ID NO: 7604 - protein, 7 aa, Artificial Sequence
  n-mer motif
WGVSNSA

SEQ ID NO: 7605 - protein, 7 aa, Artificial Sequence
  n-mer motif
AHMHSEL

SEQ ID NO: 7606 - protein, 7 aa, Artificial Sequence
  n-mer motif
NNLTNST

SEQ ID NO: 7607 - protein, 7 aa, Artificial Sequence
  n-mer motif
SSGGMKA

SEQ ID NO: 7608 - protein, 7 aa, Artificial Sequence
  n-mer motif
VGYGEHV

SEQ ID NO: 7609 - protein, 7 aa, Artificial Sequence
  n-mer motif
TIVSTSY

SEQ ID NO: 7610 - protein, 7 aa, Artificial Sequence
  n-mer motif
PTSHQEP

SEQ ID NO: 7611 - protein, 7 aa, Artificial Sequence
  n-mer motif
SNLRNTI

SEQ ID NO: 7612 - protein, 7 aa, Artificial Sequence
  n-mer motif
SRHDVRN

SEQ ID NO: 7613 - protein, 7 aa, Artificial Sequence
  n-mer motif
QMNIHDK

SEQ ID NO: 7614 - protein, 7 aa, Artificial Sequence
  n-mer motif
WAMNNVP

SEQ ID NO: 7615 - protein, 7 aa, Artificial Sequence
  n-mer motif
AMDGYRV

SEQ ID NO: 7616 - protein, 7 aa, Artificial Sequence
  n-mer motif
KGGNLTA

SEQ ID NO: 7617 - protein, 7 aa, Artificial Sequence
  n-mer motif
IGKDSVP

SEQ ID NO: 7618 - protein, 7 aa, Artificial Sequence
  n-mer motif
VQLTHNG

SEQ ID NO: 7619 - protein, 7 aa, Artificial Sequence
  n-mer motif
GLNQITS

SEQ ID NO: 7620 - protein, 7 aa, Artificial Sequence
  n-mer motif
RGDPSTP

SEQ ID NO: 7621 - protein, 7 aa, Artificial Sequence
  n-mer motif
VPSDPHW

SEQ ID NO: 7622 - protein, 7 aa, Artificial Sequence
  n-mer motif
TLSSQVT

SEQ ID NO: 7623 - protein, 7 aa, Artificial Sequence
  n-mer motif
NQRVEQK

SEQ ID NO: 7624 - protein, 7 aa, Artificial Sequence
  n-mer motif
VLPSRIA

SEQ ID NO: 7625 - protein, 7 aa, Artificial Sequence
  n-mer motif
GHYATNT

SEQ ID NO: 7626 - protein, 7 aa, Artificial Sequence
  n-mer motif
PSIPSFS

SEQ ID NO: 7627 - protein, 7 aa, Artificial Sequence
  n-mer motif
TYEYPTR

SEQ ID NO: 7628 - protein, 7 aa, Artificial Sequence
  n-mer motif
KDHILSL

SEQ ID NO: 7629 - protein, 7 aa, Artificial Sequence
  n-mer motif
GTGGNRE

SEQ ID NO: 7630 - protein, 7 aa, Artificial Sequence
  n-mer motif
KGDGAYE

SEQ ID NO: 7631 - protein, 7 aa, Artificial Sequence
  n-mer motif
SSFGKDN

SEQ ID NO: 7632 - protein, 7 aa, Artificial Sequence
  n-mer motif
TVSSYVQ

SEQ ID NO: 7633 - protein, 7 aa, Artificial Sequence
  n-mer motif
RAHGDNQ

SEQ ID NO: 7634 - protein, 7 aa, Artificial Sequence
  n-mer motif
YHAHSNE

SEQ ID NO: 7635 - protein, 7 aa, Artificial Sequence
  n-mer motif
ANLPSGH

SEQ ID NO: 7636 - protein, 7 aa, Artificial Sequence
  n-mer motif
ANLNLTS

SEQ ID NO: 7637 - protein, 7 aa, Artificial Sequence
  n-mer motif
RLNAGEH

SEQ ID NO: 7638 - protein, 7 aa, Artificial Sequence
  n-mer motif
YVDYSKS

SEQ ID NO: 7639 - protein, 7 aa, Artificial Sequence
  n-mer motif
ANSGLHN

SEQ ID NO: 7640 - protein, 7 aa, Artificial Sequence
  n-mer motif
TSGVLTR

SEQ ID NO: 7641 - protein, 7 aa, Artificial Sequence
  n-mer motif
GKPAQEF

SEQ ID NO: 7642 - protein, 7 aa, Artificial Sequence
  n-mer motif
VGTHLHS

SEQ ID NO: 7643 - protein, 7 aa, Artificial Sequence
  n-mer motif
PMNKDIL

SEQ ID NO: 7644 - protein, 7 aa, Artificial Sequence
  n-mer motif
DAHHSSS

SEQ ID NO: 7645 - protein, 7 aa, Artificial Sequence
  n-mer motif
TNAISQT

SEQ ID NO: 7646 - protein, 7 aa, Artificial Sequence
  n-mer motif
VLSDKAY

SEQ ID NO: 7647 - protein, 7 aa, Artificial Sequence
  n-mer motif
NLLVDQR

SEQ ID NO: 7648 - protein, 7 aa, Artificial Sequence
  n-mer motif
TGHPPAA

SEQ ID NO: 7649 - protein, 7 aa, Artificial Sequence
  n-mer motif
ISSGILS

SEQ ID NO: 7650 - protein, 7 aa, Artificial Sequence
  n-mer motif
NTNLLGY

SEQ ID NO: 7651 - protein, 7 aa, Artificial Sequence
  n-mer motif
TLSVTLG

SEQ ID NO: 7652 - protein, 7 aa, Artificial Sequence
  n-mer motif
HTGVQTN

SEQ ID NO: 7653 - protein, 7 aa, Artificial Sequence
  n-mer motif
EVSNNNY

SEQ ID NO: 7654 - protein, 7 aa, Artificial Sequence
  n-mer motif
LANISLY

SEQ ID NO: 7655 - protein, 7 aa, Artificial Sequence
  n-mer motif
VEHVAHQ

SEQ ID NO: 7656 - protein, 7 aa, Artificial Sequence
  n-mer motif
VDKSEAD

SEQ ID NO: 7657 - protein, 7 aa, Artificial Sequence
  n-mer motif
GFALTGT

SEQ ID NO: 7658 - protein, 7 aa, Artificial Sequence
  n-mer motif
LLTAPHR

SEQ ID NO: 7659 - protein, 7 aa, Artificial Sequence
  n-mer motif
NAGALMG

SEQ ID NO: 7660 - protein, 7 aa, Artificial Sequence
  n-mer motif
RTQAGDS

SEQ ID NO: 7661 - protein, 7 aa, Artificial Sequence
  n-mer motif
NTHRQEY

SEQ ID NO: 7662 - protein, 7 aa, Artificial Sequence
  n-mer motif
NIAGGEQ

SEQ ID NO: 7663 - protein, 7 aa, Artificial Sequence
  n-mer motif
EINNRTG

SEQ ID NO: 7664 - protein, 7 aa, Artificial Sequence
  n-mer motif
TVNTMYT

SEQ ID NO: 7665 - protein, 7 aa, Artificial Sequence
  n-mer motif
PMNGILL

SEQ ID NO: 7666 - protein, 7 aa, Artificial Sequence
  n-mer motif
NPSYDHR

SEQ ID NO: 7667 - protein, 7 aa, Artificial Sequence
  n-mer motif
AVILNPV

SEQ ID NO: 7668 - protein, 7 aa, Artificial Sequence
  n-mer motif
LYGGAHQ

SEQ ID NO: 7669 - protein, 7 aa, Artificial Sequence
  n-mer motif
QVNQPRI

SEQ ID NO: 7670 - protein, 7 aa, Artificial Sequence
  n-mer motif
AVRTPAM

SEQ ID NO: 7671 - protein, 7 aa, Artificial Sequence
  n-mer motif
SLTPNNL

SEQ ID NO: 7672 - protein, 7 aa, Artificial Sequence
  n-mer motif
LGQVNST

SEQ ID NO: 7673 - protein, 7 aa, Artificial Sequence
  n-mer motif
ANSATNQ

SEQ ID NO: 7674 - protein, 7 aa, Artificial Sequence
  n-mer motif
SLTEKAP

SEQ ID NO: 7675 - protein, 7 aa, Artificial Sequence
  n-mer motif
QFHGTSE

SEQ ID NO: 7676 - protein, 7 aa, Artificial Sequence
  n-mer motif
KNGAIGT

SEQ ID NO: 7677 - protein, 7 aa, Artificial Sequence
  n-mer motif
VLASTEK

SEQ ID NO: 7678 - protein, 7 aa, Artificial Sequence
  n-mer motif
SNMSEAI

SEQ ID NO: 7679 - protein, 7 aa, Artificial Sequence
  n-mer motif
NANAGGN

SEQ ID NO: 7680 - protein, 7 aa, Artificial Sequence
  n-mer motif
HSNTHYE

SEQ ID NO: 7681 - protein, 7 aa, Artificial Sequence
  n-mer motif
SALISVV

SEQ ID NO: 7682 - protein, 7 aa, Artificial Sequence
  n-mer motif
VATHYNE

SEQ ID NO: 7683 - protein, 7 aa, Artificial Sequence
  n-mer motif
NQTLQVD

SEQ ID NO: 7684 - protein, 7 aa, Artificial Sequence
  n-mer motif
KTPSASE

SEQ ID NO: 7685 - protein, 7 aa, Artificial Sequence
  n-mer motif
GESRTNM

SEQ ID NO: 7686 - protein, 7 aa, Artificial Sequence
  n-mer motif
RNEPVST

SEQ ID NO: 7687 - protein, 7 aa, Artificial Sequence
  n-mer motif
ATHAMRP

SEQ ID NO: 7688 - protein, 7 aa, Artificial Sequence
  n-mer motif
WESLSNA

SEQ ID NO: 7689 - protein, 7 aa, Artificial Sequence
  n-mer motif
HSPPTTM

SEQ ID NO: 7690 - protein, 7 aa, Artificial Sequence
  n-mer motif
STMNTIT

SEQ ID NO: 7691 - protein, 7 aa, Artificial Sequence
  n-mer motif
NMEHTMA

SEQ ID NO: 7692 - protein, 7 aa, Artificial Sequence
  n-mer motif
HNTESKT

SEQ ID NO: 7693 - protein, 7 aa, Artificial Sequence
  n-mer motif
HNLMTQI

SEQ ID NO: 7694 - protein, 7 aa, Artificial Sequence
  n-mer motif
NQNTYEL

SEQ ID NO: 7695 - protein, 7 aa, Artificial Sequence
  n-mer motif
YATLDTI

SEQ ID NO: 7696 - protein, 7 aa, Artificial Sequence
  n-mer motif
VQLENAN

SEQ ID NO: 7697 - protein, 7 aa, Artificial Sequence
  n-mer motif
GLTGYTM

SEQ ID NO: 7698 - protein, 7 aa, Artificial Sequence
  n-mer motif
LVLDSRN

SEQ ID NO: 7699 - protein, 7 aa, Artificial Sequence
  n-mer motif
MLVQNTP

SEQ ID NO: 7700 - protein, 7 aa, Artificial Sequence
  n-mer motif
PHNQEMG

SEQ ID NO: 7701 - protein, 7 aa, Artificial Sequence
  n-mer motif
SLGDAML

SEQ ID NO: 7702 - protein, 7 aa, Artificial Sequence
  n-mer motif
RAEGSSG

SEQ ID NO: 7703 - protein, 7 aa, Artificial Sequence
  n-mer motif
SEERTRA

SEQ ID NO: 7704 - protein, 7 aa, Artificial Sequence
  n-mer motif
SSKERTS

SEQ ID NO: 7705 - protein, 7 aa, Artificial Sequence
  n-mer motif
PVVRDRS

SEQ ID NO: 7706 - protein, 7 aa, Artificial Sequence
  n-mer motif
RMSESSD

SEQ ID NO: 7707 - protein, 7 aa, Artificial Sequence
  n-mer motif
NQSISMD

SEQ ID NO: 7708 - protein, 7 aa, Artificial Sequence
  n-mer motif
VAVSNTP

SEQ ID NO: 7709 - protein, 7 aa, Artificial Sequence
  n-mer motif
GDISSRN

SEQ ID NO: 7710 - protein, 7 aa, Artificial Sequence
  n-mer motif
AAGADSP

SEQ ID NO: 7711 - protein, 7 aa, Artificial Sequence
  n-mer motif
FGTSYTT

SEQ ID NO: 7712 - protein, 7 aa, Artificial Sequence
  n-mer motif
RDTNTDK

SEQ ID NO: 7713 - protein, 7 aa, Artificial Sequence
  n-mer motif
GSTPGAS

SEQ ID NO: 7714 - protein, 7 aa, Artificial Sequence
  n-mer motif
GTNHDFS

SEQ ID NO: 7715 - protein, 7 aa, Artificial Sequence
  n-mer motif
NESTKES

SEQ ID NO: 7716 - protein, 7 aa, Artificial Sequence
  n-mer motif
VHVTNVL

SEQ ID NO: 7717 - protein, 7 aa, Artificial Sequence
  n-mer motif
STTNVAY

SEQ ID NO: 7718 - protein, 7 aa, Artificial Sequence
  n-mer motif
ITSLNGM

SEQ ID NO: 7719 - protein, 7 aa, Artificial Sequence
  n-mer motif
EVRGSVP

SEQ ID NO: 7720 - protein, 7 aa, Artificial Sequence
  n-mer motif
ALTRMPN

SEQ ID NO: 7721 - protein, 7 aa, Artificial Sequence
  n-mer motif
LSVADRP

SEQ ID NO: 7722 - protein, 7 aa, Artificial Sequence
  n-mer motif
VSTAQRQ

SEQ ID NO: 7723 - protein, 7 aa, Artificial Sequence
  n-mer motif
LNAEYTN

SEQ ID NO: 7724 - protein, 7 aa, Artificial Sequence
  n-mer motif
NEKPQST

SEQ ID NO: 7725 - protein, 7 aa, Artificial Sequence
  n-mer motif
LNTLIDK

SEQ ID NO: 7726 - protein, 7 aa, Artificial Sequence
  n-mer motif
VTHTLIE

SEQ ID NO: 7727 - protein, 7 aa, Artificial Sequence
  n-mer motif
EQKKTDH

SEQ ID NO: 7728 - protein, 7 aa, Artificial Sequence
  n-mer motif
TSGMYDT

SEQ ID NO: 7729 - protein, 7 aa, Artificial Sequence
  n-mer motif
PDAARSP

SEQ ID NO: 7730 - protein, 7 aa, Artificial Sequence
  n-mer motif
LTQVYHE

SEQ ID NO: 7731 - protein, 7 aa, Artificial Sequence
  n-mer motif
REMSSLS

SEQ ID NO: 7732 - protein, 7 aa, Artificial Sequence
  n-mer motif
MPSKGEV

SEQ ID NO: 7733 - protein, 7 aa, Artificial Sequence
  n-mer motif
NEQNTPS

SEQ ID NO: 7734 - protein, 7 aa, Artificial Sequence
  n-mer motif
KNYASTD

SEQ ID NO: 7735 - protein, 7 aa, Artificial Sequence
  n-mer motif
CMDVGKA

SEQ ID NO: 7736 - protein, 7 aa, Artificial Sequence
  n-mer motif
ALHNLMN

SEQ ID NO: 7737 - protein, 7 aa, Artificial Sequence
  n-mer motif
PDRANDK

SEQ ID NO: 7738 - protein, 7 aa, Artificial Sequence
  n-mer motif
IAHVSTN

SEQ ID NO: 7739 - protein, 7 aa, Artificial Sequence
  n-mer motif
NGPTGSA

SEQ ID NO: 7740 - protein, 7 aa, Artificial Sequence
  n-mer motif
STHHADR

SEQ ID NO: 7741 - protein, 7 aa, Artificial Sequence
  n-mer motif
GSQYGRH

SEQ ID NO: 7742 - protein, 7 aa, Artificial Sequence
  n-mer motif
TGTATLP

SEQ ID NO: 7743 - protein, 7 aa, Artificial Sequence
  n-mer motif
KAHVVEI

SEQ ID NO: 7744 - protein, 7 aa, Artificial Sequence
  n-mer motif
TSQGRSP

SEQ ID NO: 7745 - protein, 7 aa, Artificial Sequence
  n-mer motif
LSSESPR

SEQ ID NO: 7746 - protein, 7 aa, Artificial Sequence
  n-mer motif
TGVRETI

SEQ ID NO: 7747 - protein, 7 aa, Artificial Sequence
  n-mer motif
MDTELYR

SEQ ID NO: 7748 - protein, 7 aa, Artificial Sequence
  n-mer motif
TPEASAR

SEQ ID NO: 7749 - protein, 7 aa, Artificial Sequence
  n-mer motif
HDLNHGK

SEQ ID NO: 7750 - protein, 7 aa, Artificial Sequence
  n-mer motif
LTGQNAI

SEQ ID NO: 7751 - protein, 7 aa, Artificial Sequence
  n-mer motif
TVGSNSI

SEQ ID NO: 7752 - protein, 7 aa, Artificial Sequence
  n-mer motif
HTVGAMH

SEQ ID NO: 7753 - protein, 7 aa, Artificial Sequence
  n-mer motif
ERVNGMA

SEQ ID NO: 7754 - protein, 7 aa, Artificial Sequence
  n-mer motif
SEPLRVG

SEQ ID NO: 7755 - protein, 7 aa, Artificial Sequence
  n-mer motif
VSNVLYS

SEQ ID NO: 7756 - protein, 7 aa, Artificial Sequence
  n-mer motif
FSSGTTI

SEQ ID NO: 7757 - protein, 7 aa, Artificial Sequence
  n-mer motif
TNLSQSA

SEQ ID NO: 7758 - protein, 7 aa, Artificial Sequence
  n-mer motif
PNTASNF

SEQ ID NO: 7759 - protein, 7 aa, Artificial Sequence
  n-mer motif
CGLNCGK

SEQ ID NO: 7760 - protein, 7 aa, Artificial Sequence
  n-mer motif
PTGGSPP

SEQ ID NO: 7761 - protein, 7 aa, Artificial Sequence
  n-mer motif
YLESNYT

SEQ ID NO: 7762 - protein, 7 aa, Artificial Sequence
  n-mer motif
TLETTRS

SEQ ID NO: 7763 - protein, 7 aa, Artificial Sequence
  n-mer motif
SANEHNH

SEQ ID NO: 7764 - protein, 7 aa, Artificial Sequence
  n-mer motif
ARVDTNQ

SEQ ID NO: 7765 - protein, 7 aa, Artificial Sequence
  n-mer motif
NVVKNNT

SEQ ID NO: 7766 - protein, 7 aa, Artificial Sequence
  n-mer motif
GSYSDGS

SEQ ID NO: 7767 - protein, 7 aa, Artificial Sequence
  n-mer motif
PGNGQSP

SEQ ID NO: 7768 - protein, 7 aa, Artificial Sequence
  n-mer motif
SGVNFGV

SEQ ID NO: 7769 - protein, 7 aa, Artificial Sequence
  n-mer motif
RINAAID

SEQ ID NO: 7770 - protein, 7 aa, Artificial Sequence
  n-mer motif
QAGNAPR

SEQ ID NO: 7771 - protein, 7 aa, Artificial Sequence
  n-mer motif
QSGSLVP

SEQ ID NO: 7772 - protein, 7 aa, Artificial Sequence
  n-mer motif
FSTQDIS

SEQ ID NO: 7773 - protein, 7 aa, Artificial Sequence
  n-mer motif
VNPHPAQ

SEQ ID NO: 7774 - protein, 7 aa, Artificial Sequence
  n-mer motif
KGHAYEA

SEQ ID NO: 7775 - protein, 7 aa, Artificial Sequence
  n-mer motif
EDSMRFS

SEQ ID NO: 7776 - protein, 7 aa, Artificial Sequence
  n-mer motif
GRNESPE

SEQ ID NO: 7777 - protein, 7 aa, Artificial Sequence
  n-mer motif
SDGSKLL

SEQ ID NO: 7778 - protein, 7 aa, Artificial Sequence
  n-mer motif
TLSGYMR

SEQ ID NO: 7779 - protein, 7 aa, Artificial Sequence
  n-mer motif
DIHNPRT

SEQ ID NO: 7780 - protein, 7 aa, Artificial Sequence
  n-mer motif
WAKDVNV

SEQ ID NO: 7781 - protein, 7 aa, Artificial Sequence
  n-mer motif
AVGRSDD

SEQ ID NO: 7782 - protein, 7 aa, Artificial Sequence
  n-mer motif
KEKTTRE

SEQ ID NO: 7783 - protein, 7 aa, Artificial Sequence
  n-mer motif
LLQSTYL

SEQ ID NO: 7784 - protein, 7 aa, Artificial Sequence
  n-mer motif
KSNLEGK

SEQ ID NO: 7785 - protein, 7 aa, Artificial Sequence
  n-mer motif
TRTPFLG

SEQ ID NO: 7786 - protein, 7 aa, Artificial Sequence
  n-mer motif
QSDTTSI

SEQ ID NO: 7787 - protein, 7 aa, Artificial Sequence
  n-mer motif
AWSQVLT

SEQ ID NO: 7788 - protein, 7 aa, Artificial Sequence
  n-mer motif
TQERPLI

SEQ ID NO: 7789 - protein, 7 aa, Artificial Sequence
  n-mer motif
DDKTGRY

SEQ ID NO: 7790 - protein, 7 aa, Artificial Sequence
  n-mer motif
FPSHNGA

SEQ ID NO: 7791 - protein, 7 aa, Artificial Sequence
  n-mer motif
MLSQVLT

SEQ ID NO: 7792 - protein, 7 aa, Artificial Sequence
  n-mer motif
SVTTNLM

SEQ ID NO: 7793 - protein, 7 aa, Artificial Sequence
  n-mer motif
EHNSKTY

SEQ ID NO: 7794 - protein, 7 aa, Artificial Sequence
  n-mer motif
YAHPVTH

SEQ ID NO: 7795 - protein, 7 aa, Artificial Sequence
  n-mer motif
PNPSPRQ

SEQ ID NO: 7796 - protein, 7 aa, Artificial Sequence
  n-mer motif
HMGLNEL

SEQ ID NO: 7797 - protein, 7 aa, Artificial Sequence
  n-mer motif
NSLQASA

SEQ ID NO: 7798 - protein, 7 aa, Artificial Sequence
  n-mer motif
DLGTART

SEQ ID NO: 7799 - protein, 7 aa, Artificial Sequence
  n-mer motif
YDSRLYA

SEQ ID NO: 7800 - protein, 7 aa, Artificial Sequence
  n-mer motif
PKPGTGE

SEQ ID NO: 7801 - protein, 7 aa, Artificial Sequence
  n-mer motif
SLNGVLV

SEQ ID NO: 7802 - protein, 7 aa, Artificial Sequence
  n-mer motif
QSNLVIN

SEQ ID NO: 7803 - protein, 7 aa, Artificial Sequence
  n-mer motif
ASPAQTG

SEQ ID NO: 7804 - protein, 7 aa, Artificial Sequence
  n-mer motif
NMTNENG

SEQ ID NO: 7805 - protein, 7 aa, Artificial Sequence
  n-mer motif
SLRTDEF

SEQ ID NO: 7806 - protein, 7 aa, Artificial Sequence
  n-mer motif
ILDNHRF

SEQ ID NO: 7807 - protein, 7 aa, Artificial Sequence
  n-mer motif
LINMSQN

SEQ ID NO: 7808 - protein, 7 aa, Artificial Sequence
  n-mer motif
PQDVRQT

SEQ ID NO: 7809 - protein, 7 aa, Artificial Sequence
  n-mer motif
PFVANEP

SEQ ID NO: 7810 - protein, 7 aa, Artificial Sequence
  n-mer motif
NINDTKN

SEQ ID NO: 7811 - protein, 7 aa, Artificial Sequence
  n-mer motif
NFSSGDV

SEQ ID NO: 7812 - protein, 7 aa, Artificial Sequence
  n-mer motif
ERNGLIE

SEQ ID NO: 7813 - protein, 7 aa, Artificial Sequence
  n-mer motif
NSHVPNN

SEQ ID NO: 7814 - protein, 7 aa, Artificial Sequence
  n-mer motif
NTTGSSG

SEQ ID NO: 7815 - protein, 7 aa, Artificial Sequence
  n-mer motif
STRKEHD

SEQ ID NO: 7816 - protein, 7 aa, Artificial Sequence
  n-mer motif
AANPSTE

SEQ ID NO: 7817 - protein, 7 aa, Artificial Sequence
  n-mer motif
SGMNSNK

SEQ ID NO: 7818 - protein, 7 aa, Artificial Sequence
  n-mer motif
KTLDNNA

SEQ ID NO: 7819 - protein, 7 aa, Artificial Sequence
  n-mer motif
TVKQTSP

SEQ ID NO: 7820 - protein, 7 aa, Artificial Sequence
  n-mer motif
ISQVSFN

SEQ ID NO: 7821 - protein, 7 aa, Artificial Sequence
  n-mer motif
LEVNLQT

SEQ ID NO: 7822 - protein, 7 aa, Artificial Sequence
  n-mer motif
EMQTKNA

SEQ ID NO: 7823 - protein, 7 aa, Artificial Sequence
  n-mer motif
ADNRNDK

SEQ ID NO: 7824 - protein, 7 aa, Artificial Sequence
  n-mer motif
AYDTLNS

SEQ ID NO: 7825 - protein, 7 aa, Artificial Sequence
  n-mer motif
TIQDHIK

SEQ ID NO: 7826 - protein, 7 aa, Artificial Sequence
  n-mer motif
DPTKVGS

SEQ ID NO: 7827 - protein, 7 aa, Artificial Sequence
  n-mer motif
SLQRTPD

SEQ ID NO: 7828 - protein, 7 aa, Artificial Sequence
  n-mer motif
ANDSAKT

SEQ ID NO: 7829 - protein, 7 aa, Artificial Sequence
  n-mer motif
KKVEQEP

SEQ ID NO: 7830 - protein, 7 aa, Artificial Sequence
  n-mer motif
ASRDLGQ

SEQ ID NO: 7831 - protein, 7 aa, Artificial Sequence
  n-mer motif
WESDKFR

SEQ ID NO: 7832 - protein, 7 aa, Artificial Sequence
  n-mer motif
NRGTEVY

SEQ ID NO: 7833 - protein, 7 aa, Artificial Sequence
  n-mer motif
NISSINQ

SEQ ID NO: 7834 - protein, 7 aa, Artificial Sequence
  n-mer motif
ASKGFGH

SEQ ID NO: 7835 - protein, 7 aa, Artificial Sequence
  n-mer motif
QSQNVTQ

SEQ ID NO: 7836 - protein, 7 aa, Artificial Sequence
  n-mer motif
NGYQLQI

SEQ ID NO: 7837 - protein, 7 aa, Artificial Sequence
  n-mer motif
CTNASDL

SEQ ID NO: 7838 - protein, 7 aa, Artificial Sequence
  n-mer motif
TVASPNT

SEQ ID NO: 7839 - protein, 7 aa, Artificial Sequence
  n-mer motif
NTAPPNH

SEQ ID NO: 7840 - protein, 7 aa, Artificial Sequence
  n-mer motif
LSQQRDY

SEQ ID NO: 7841 - protein, 7 aa, Artificial Sequence
  n-mer motif
WNQNVSH

SEQ ID NO: 7842 - protein, 7 aa, Artificial Sequence
  n-mer motif
TGSSDRL

SEQ ID NO: 7843 - protein, 7 aa, Artificial Sequence
  n-mer motif
NTTPPNH

SEQ ID NO: 7844 - protein, 7 aa, Artificial Sequence
  n-mer motif
VVDSTYP

SEQ ID NO: 7845 - protein, 7 aa, Artificial Sequence
  n-mer motif
TDATGRH

SEQ ID NO: 7846 - protein, 7 aa, Artificial Sequence
  n-mer motif
LFTAGST

SEQ ID NO: 7847 - protein, 7 aa, Artificial Sequence
  n-mer motif
LRDQTSM

SEQ ID NO: 7848 - protein, 7 aa, Artificial Sequence
  n-mer motif
IETDRHR

SEQ ID NO: 7849 - protein, 7 aa, Artificial Sequence
  n-mer motif
SGPENTL

SEQ ID NO: 7850 - protein, 7 aa, Artificial Sequence
  n-mer motif
DNQNADR

SEQ ID NO: 7851 - protein, 7 aa, Artificial Sequence
  n-mer motif
HDGYVPN

SEQ ID NO: 7852 - protein, 7 aa, Artificial Sequence
  n-mer motif
HMSSYSS

SEQ ID NO: 7853 - protein, 7 aa, Artificial Sequence
  n-mer motif
SRLQTQQ

SEQ ID NO: 7854 - protein, 7 aa, Artificial Sequence
  n-mer motif
SYTAGRP

SEQ ID NO: 7855 - protein, 7 aa, Artificial Sequence
  n-mer motif
VQQNNIN

SEQ ID NO: 7856 - protein, 7 aa, Artificial Sequence
  n-mer motif
DAKALTT

SEQ ID NO: 7857 - protein, 7 aa, Artificial Sequence
  n-mer motif
KDEHLHY

SEQ ID NO: 7858 - protein, 7 aa, Artificial Sequence
  n-mer motif
HGDRTAL

SEQ ID NO: 7859 - protein, 7 aa, Artificial Sequence
  n-mer motif
NFTITEA

SEQ ID NO: 7860 - protein, 7 aa, Artificial Sequence
  n-mer motif
DTHMNKL

SEQ ID NO: 7861 - protein, 7 aa, Artificial Sequence
  n-mer motif
QPGAPQT

SEQ ID NO: 7862 - protein, 7 aa, Artificial Sequence
  n-mer motif
GEARREA

SEQ ID NO: 7863 - protein, 7 aa, Artificial Sequence
  n-mer motif
KSLSSDD

SEQ ID NO: 7864 - protein, 7 aa, Artificial Sequence
  n-mer motif
MNTTYNE

SEQ ID NO: 7865 - protein, 7 aa, Artificial Sequence
  n-mer motif
AAALETI

SEQ ID NO: 7866 - protein, 7 aa, Artificial Sequence
  n-mer motif
NVAPYSS

SEQ ID NO: 7867 - protein, 7 aa, Artificial Sequence
  n-mer motif
SAGMVSL

SEQ ID NO: 7868 - protein, 7 aa, Artificial Sequence
  n-mer motif
CDLSQSC

SEQ ID NO: 7869 - protein, 7 aa, Artificial Sequence
  n-mer motif
VLITMSS

SEQ ID NO: 7870 - protein, 7 aa, Artificial Sequence
  n-mer motif
QVGALMV

SEQ ID NO: 7871 - protein, 7 aa, Artificial Sequence
  n-mer motif
QRTSEAP

SEQ ID NO: 7872 - protein, 7 aa, Artificial Sequence
  n-mer motif
LGNGSSL

SEQ ID NO: 7873 - protein, 7 aa, Artificial Sequence
  n-mer motif
PSVRLPL

SEQ ID NO: 7874 - protein, 7 aa, Artificial Sequence
  n-mer motif
DSAPSTI

SEQ ID NO: 7875 - protein, 7 aa, Artificial Sequence
  n-mer motif
NYNGVNV

SEQ ID NO: 7876 - protein, 7 aa, Artificial Sequence
  n-mer motif
SAHQTPT

SEQ ID NO: 7877 - protein, 7 aa, Artificial Sequence
  n-mer motif
DHSKQIS

SEQ ID NO: 7878 - protein, 7 aa, Artificial Sequence
  n-mer motif
AASLSQS

SEQ ID NO: 7879 - protein, 7 aa, Artificial Sequence
  n-mer motif
HADVGMS

SEQ ID NO: 7880 - protein, 7 aa, Artificial Sequence
  n-mer motif
HVTVTLN

SEQ ID NO: 7881 - protein, 7 aa, Artificial Sequence
  n-mer motif
NSTHINS

SEQ ID NO: 7882 - protein, 7 aa, Artificial Sequence
  n-mer motif
LGLAGQV

SEQ ID NO: 7883 - protein, 7 aa, Artificial Sequence
  n-mer motif
SSQAHGP

SEQ ID NO: 7884 - protein, 7 aa, Artificial Sequence
  n-mer motif
AFKSGSI

SEQ ID NO: 7885 - protein, 7 aa, Artificial Sequence
  n-mer motif
HSPSHDS

SEQ ID NO: 7886 - protein, 7 aa, Artificial Sequence
  n-mer motif
PNGESSR

SEQ ID NO: 7887 - protein, 7 aa, Artificial Sequence
  n-mer motif
ILTPLDK

SEQ ID NO: 7888 - protein, 7 aa, Artificial Sequence
  n-mer motif
SASYSRM

SEQ ID NO: 7889 - protein, 7 aa, Artificial Sequence
  n-mer motif
EALHDRN

SEQ ID NO: 7890 - protein, 7 aa, Artificial Sequence
  n-mer motif
GEQHNAP

SEQ ID NO: 7891 - protein, 7 aa, Artificial Sequence
  n-mer motif
GNMVTPN

SEQ ID NO: 7892 - protein, 7 aa, Artificial Sequence
  n-mer motif
NALLNAP

SEQ ID NO: 7893 - protein, 7 aa, Artificial Sequence
  n-mer motif
ASDLQMT

SEQ ID NO: 7894 - protein, 7 aa, Artificial Sequence
  n-mer motif
SYDMHTN

SEQ ID NO: 7895 - protein, 7 aa, Artificial Sequence
  n-mer motif
NMSHSTL

SEQ ID NO: 7896 - protein, 7 aa, Artificial Sequence
  n-mer motif
TANNHSP

SEQ ID NO: 7897 - protein, 7 aa, Artificial Sequence
  n-mer motif
QAPPTAQ

SEQ ID NO: 7898 - protein, 7 aa, Artificial Sequence
  n-mer motif
NYHGDNV

SEQ ID NO: 7899 - protein, 7 aa, Artificial Sequence
  n-mer motif
RDSTISR

SEQ ID NO: 7900 - protein, 7 aa, Artificial Sequence
  n-mer motif
VSSPNGT

SEQ ID NO: 7901 - protein, 7 aa, Artificial Sequence
  n-mer motif
SRITVNA

SEQ ID NO: 7902 - protein, 7 aa, Artificial Sequence
  n-mer motif
VGTTSNG

SEQ ID NO: 7903 - protein, 7 aa, Artificial Sequence
  n-mer motif
HTNQMQP

SEQ ID NO: 7904 - protein, 7 aa, Artificial Sequence
  n-mer motif
KSNAGFG

SEQ ID NO: 7905 - protein, 7 aa, Artificial Sequence
  n-mer motif
KESLEDV

SEQ ID NO: 7906 - protein, 7 aa, Artificial Sequence
  n-mer motif
AQVNNHD

SEQ ID NO: 7907 - protein, 7 aa, Artificial Sequence
  n-mer motif
NASTYMD

SEQ ID NO: 7908 - protein, 7 aa, Artificial Sequence
  n-mer motif
TSDTNAR

SEQ ID NO: 7909 - protein, 7 aa, Artificial Sequence
  n-mer motif
ESRMRSI

SEQ ID NO: 7910 - protein, 7 aa, Artificial Sequence
  n-mer motif
RVEDTNS

SEQ ID NO: 7911 - protein, 7 aa, Artificial Sequence
  n-mer motif
ASNHLQA

SEQ ID NO: 7912 - protein, 7 aa, Artificial Sequence
  n-mer motif
RLHGSDS

SEQ ID NO: 7913 - protein, 7 aa, Artificial Sequence
  n-mer motif
TVEQINS

SEQ ID NO: 7914 - protein, 7 aa, Artificial Sequence
  n-mer motif
RSVPSPH

SEQ ID NO: 7915 - protein, 7 aa, Artificial Sequence
  n-mer motif
EYLALGH

SEQ ID NO: 7916 - protein, 7 aa, Artificial Sequence
  n-mer motif
NTNNQEQ

SEQ ID NO: 7917 - protein, 7 aa, Artificial Sequence
  n-mer motif
NYGSGRI

SEQ ID NO: 7918 - protein, 7 aa, Artificial Sequence
  n-mer motif
RHGDTPM

SEQ ID NO: 7919 - protein, 7 aa, Artificial Sequence
  n-mer motif
NDTIGRP

SEQ ID NO: 7920 - protein, 7 aa, Artificial Sequence
  n-mer motif
YGERART

SEQ ID NO: 7921 - protein, 7 aa, Artificial Sequence
  n-mer motif
VLGMQRS

SEQ ID NO: 7922 - protein, 7 aa, Artificial Sequence
  n-mer motif
LHFHASQ

SEQ ID NO: 7923 - protein, 7 aa, Artificial Sequence
  n-mer motif
TDTLSER

SEQ ID NO: 7924 - protein, 7 aa, Artificial Sequence
  n-mer motif
GTGTVGW

SEQ ID NO: 7925 - protein, 7 aa, Artificial Sequence
  n-mer motif
TESPKLL

SEQ ID NO: 7926 - protein, 7 aa, Artificial Sequence
  n-mer motif
TIRSEGF

SEQ ID NO: 7927 - protein, 7 aa, Artificial Sequence
  n-mer motif
ASSYINN

SEQ ID NO: 7928 - protein, 7 aa, Artificial Sequence
  n-mer motif
LHLGLSS

SEQ ID NO: 7929 - protein, 7 aa, Artificial Sequence
  n-mer motif
VTGTTPG

SEQ ID NO: 7930 - protein, 7 aa, Artificial Sequence
  n-mer motif
VTSSASG

SEQ ID NO: 7931 - protein, 7 aa, Artificial Sequence
  n-mer motif
QMHLHMQ

SEQ ID NO: 7932 - protein, 7 aa, Artificial Sequence
  n-mer motif
GTMSLLM

SEQ ID NO: 7933 - protein, 7 aa, Artificial Sequence
  n-mer motif
CASEVCQ

SEQ ID NO: 7934 - protein, 7 aa, Artificial Sequence
  n-mer motif
NLVMSGT

SEQ ID NO: 7935 - protein, 7 aa, Artificial Sequence
  n-mer motif
QSLKDGT

SEQ ID NO: 7936 - protein, 7 aa, Artificial Sequence
  n-mer motif
ALNGSGI

SEQ ID NO: 7937 - protein, 7 aa, Artificial Sequence
  n-mer motif
RHVVPDS

SEQ ID NO: 7938 - protein, 7 aa, Artificial Sequence
  n-mer motif
LYHDSHL

SEQ ID NO: 7939 - protein, 7 aa, Artificial Sequence
  n-mer motif
GSTPITS

SEQ ID NO: 7940 - protein, 7 aa, Artificial Sequence
  n-mer motif
PNDQISG

SEQ ID NO: 7941 - protein, 7 aa, Artificial Sequence
  n-mer motif
SGKQDKY

SEQ ID NO: 7942 - protein, 7 aa, Artificial Sequence
  n-mer motif
SGHASQG

SEQ ID NO: 7943 - protein, 7 aa, Artificial Sequence
  n-mer motif
KMGSIEV

SEQ ID NO: 7944 - protein, 7 aa, Artificial Sequence
  n-mer motif
STLDRSE

SEQ ID NO: 7945 - protein, 7 aa, Artificial Sequence
  n-mer motif
TELSEYT

SEQ ID NO: 7946 - protein, 7 aa, Artificial Sequence
  n-mer motif
ANGGGYP

SEQ ID NO: 7947 - protein, 7 aa, Artificial Sequence
  n-mer motif
VTESNSL

SEQ ID NO: 7948 - protein, 7 aa, Artificial Sequence
  n-mer motif
PVYDRDV

SEQ ID NO: 7949 - protein, 7 aa, Artificial Sequence
  n-mer motif
DNNKHGT

SEQ ID NO: 7950 - protein, 7 aa, Artificial Sequence
  n-mer motif
IYETVTL

SEQ ID NO: 7951 - protein, 7 aa, Artificial Sequence
  n-mer motif
TQTGHVS

SEQ ID NO: 7952 - protein, 7 aa, Artificial Sequence
  n-mer motif
QADLRYK

SEQ ID NO: 7953 - protein, 7 aa, Artificial Sequence
  n-mer motif
CKTNNAG

SEQ ID NO: 7954 - protein, 7 aa, Artificial Sequence
  n-mer motif
AGHQQLA

SEQ ID NO: 7955 - protein, 7 aa, Artificial Sequence
  n-mer motif
DRDMEGV

SEQ ID NO: 7956 - protein, 7 aa, Artificial Sequence
  n-mer motif
DQPGYVR

SEQ ID NO: 7957 - protein, 7 aa, Artificial Sequence
  n-mer motif
DAMLAHP

SEQ ID NO: 7958 - protein, 7 aa, Artificial Sequence
  n-mer motif
ALNLYSS

SEQ ID NO: 7959 - protein, 7 aa, Artificial Sequence
  n-mer motif
LLSKGDS

SEQ ID NO: 7960 - protein, 7 aa, Artificial Sequence
  n-mer motif
SSISLRY

SEQ ID NO: 7961 - protein, 7 aa, Artificial Sequence
  n-mer motif
GSSQHHE

SEQ ID NO: 7962 - protein, 7 aa, Artificial Sequence
  n-mer motif
SIGYSPP

SEQ ID NO: 7963 - protein, 7 aa, Artificial Sequence
  n-mer motif
HSNATTI

SEQ ID NO: 7964 - protein, 7 aa, Artificial Sequence
  n-mer motif
SAHDARL

SEQ ID NO: 7965 - protein, 7 aa, Artificial Sequence
  n-mer motif
VHTADTI

SEQ ID NO: 7966 - protein, 7 aa, Artificial Sequence
  n-mer motif
RDGSTKV

SEQ ID NO: 7967 - protein, 7 aa, Artificial Sequence
  n-mer motif
LQESLPG

SEQ ID NO: 7968 - protein, 7 aa, Artificial Sequence
  n-mer motif
LDYTPQN

SEQ ID NO: 7969 - protein, 7 aa, Artificial Sequence
  n-mer motif
GPSSHIV

SEQ ID NO: 7970 - protein, 7 aa, Artificial Sequence
  n-mer motif
SADTRSP

SEQ ID NO: 7971 - protein, 7 aa, Artificial Sequence
  n-mer motif
MMKSEEN

SEQ ID NO: 7972 - protein, 7 aa, Artificial Sequence
  n-mer motif
GMTSELT

SEQ ID NO: 7973 - protein, 7 aa, Artificial Sequence
  n-mer motif
VDTYSGL

SEQ ID NO: 7974 - protein, 7 aa, Artificial Sequence
  n-mer motif
GMRDTPP

SEQ ID NO: 7975 - protein, 7 aa, Artificial Sequence
  n-mer motif
EHDVSTR

SEQ ID NO: 7976 - protein, 7 aa, Artificial Sequence
  n-mer motif
EVVKTTH

SEQ ID NO: 7977 - protein, 7 aa, Artificial Sequence
  n-mer motif
VYDNVSS

SEQ ID NO: 7978 - protein, 7 aa, Artificial Sequence
  n-mer motif
LMKDMES

SEQ ID NO: 7979 - protein, 7 aa, Artificial Sequence
  n-mer motif
PLHVASP

SEQ ID NO: 7980 - protein, 7 aa, Artificial Sequence
  n-mer motif
EVRDQKT

SEQ ID NO: 7981 - protein, 7 aa, Artificial Sequence
  n-mer motif
PTPYYTA

SEQ ID NO: 7982 - protein, 7 aa, Artificial Sequence
  n-mer motif
NNYAYSA

SEQ ID NO: 7983 - protein, 7 aa, Artificial Sequence
  n-mer motif
LVDTDRN

SEQ ID NO: 7984 - protein, 7 aa, Artificial Sequence
  n-mer motif
YPADHRT

SEQ ID NO: 7985 - protein, 7 aa, Artificial Sequence
  n-mer motif
SATTNHG

SEQ ID NO: 7986 - protein, 7 aa, Artificial Sequence
  n-mer motif
RDDQQLD

SEQ ID NO: 7987 - protein, 7 aa, Artificial Sequence
  n-mer motif
GAGQSHV

SEQ ID NO: 7988 - protein, 7 aa, Artificial Sequence
  n-mer motif
DRTYHEV

SEQ ID NO: 7989 - protein, 7 aa, Artificial Sequence
  n-mer motif
DGNNTTY

SEQ ID NO: 7990 - protein, 7 aa, Artificial Sequence
  n-mer motif
VHMESYA

SEQ ID NO: 7991 - protein, 7 aa, Artificial Sequence
  n-mer motif
WYETISP

SEQ ID NO: 7992 - protein, 7 aa, Artificial Sequence
  n-mer motif
LLGAHQP

SEQ ID NO: 7993 - protein, 7 aa, Artificial Sequence
  n-mer motif
HVPNTEA

SEQ ID NO: 7994 - protein, 7 aa, Artificial Sequence
  n-mer motif
NSQNPQG

SEQ ID NO: 7995 - protein, 7 aa, Artificial Sequence
  n-mer motif
LQDRATN

SEQ ID NO: 7996 - protein, 7 aa, Artificial Sequence
  n-mer motif
IVNQHSE

SEQ ID NO: 7997 - protein, 7 aa, Artificial Sequence
  n-mer motif
FEQGKVE

SEQ ID NO: 7998 - protein, 7 aa, Artificial Sequence
  n-mer motif
VATGVFA

SEQ ID NO: 7999 - protein, 7 aa, Artificial Sequence
  n-mer motif
DKIQNET

SEQ ID NO: 8000 - protein, 7 aa, Artificial Sequence
  n-mer motif
TDNPSYK

SEQ ID NO: 8001 - protein, 7 aa, Artificial Sequence
  n-mer motif
GVNTKIE

SEQ ID NO: 8002 - protein, 7 aa, Artificial Sequence
  n-mer motif
GSHNGPA

SEQ ID NO: 8003 - protein, 7 aa, Artificial Sequence
  n-mer motif
SNMGVAS

SEQ ID NO: 8004 - protein, 7 aa, Artificial Sequence
  n-mer motif
NTDTNEK

SEQ ID NO: 8005 - protein, 7 aa, Artificial Sequence
  n-mer motif
SALLRMD

SEQ ID NO: 8006 - protein, 7 aa, Artificial Sequence
  n-mer motif
PQLSGTA

SEQ ID NO: 8007 - protein, 7 aa, Artificial Sequence
  n-mer motif
SIVNNGA

SEQ ID NO: 8008 - protein, 7 aa, Artificial Sequence
  n-mer motif
SLDHAPL

SEQ ID NO: 8009 - protein, 7 aa, Artificial Sequence
  n-mer motif
DHSKQNS

SEQ ID NO: 8010 - protein, 7 aa, Artificial Sequence
  n-mer motif
HSDMVSG

SEQ ID NO: 8011 - protein, 7 aa, Artificial Sequence
  n-mer motif
QHRAQDV

SEQ ID NO: 8012 - protein, 7 aa, Artificial Sequence
  n-mer motif
GSTKSGQ

SEQ ID NO: 8013 - protein, 7 aa, Artificial Sequence
  n-mer motif
TMSVTLE

SEQ ID NO: 8014 - protein, 7 aa, Artificial Sequence
  n-mer motif
YNNGGHV

SEQ ID NO: 8015 - protein, 7 aa, Artificial Sequence
  n-mer motif
GTAENTS

SEQ ID NO: 8016 - protein, 7 aa, Artificial Sequence
  n-mer motif
NSYDATR

SEQ ID NO: 8017 - protein, 7 aa, Artificial Sequence
  n-mer motif
SVNNMRL

SEQ ID NO: 8018 - protein, 7 aa, Artificial Sequence
  n-mer motif
LNLQYTL

SEQ ID NO: 8019 - protein, 7 aa, Artificial Sequence
  n-mer motif
EAQTGWV

SEQ ID NO: 8020 - protein, 7 aa, Artificial Sequence
  n-mer motif
PAEGNNR

SEQ ID NO: 8021 - protein, 7 aa, Artificial Sequence
  n-mer motif
SLGGNPP

SEQ ID NO: 8022 - protein, 7 aa, Artificial Sequence
  n-mer motif
YNRDNGS

SEQ ID NO: 8023 - protein, 7 aa, Artificial Sequence
  n-mer motif
LTDPKGQ

SEQ ID NO: 8024 - protein, 7 aa, Artificial Sequence
  n-mer motif
TPTGTNK

SEQ ID NO: 8025 - protein, 7 aa, Artificial Sequence
  n-mer motif
VHANATL

SEQ ID NO: 8026 - protein, 7 aa, Artificial Sequence
  n-mer motif
REIVHSN

SEQ ID NO: 8027 - protein, 7 aa, Artificial Sequence
  n-mer motif
YAVAIGT

SEQ ID NO: 8028 - protein, 7 aa, Artificial Sequence
  n-mer motif
NTTPPDH

SEQ ID NO: 8029 - protein, 7 aa, Artificial Sequence
  n-mer motif
VIQSDNT

SEQ ID NO: 8030 - protein, 7 aa, Artificial Sequence
  n-mer motif
VPAHSRG

SEQ ID NO: 8031 - protein, 7 aa, Artificial Sequence
  n-mer motif
QNSDLAS

SEQ ID NO: 8032 - protein, 7 aa, Artificial Sequence
  n-mer motif
RIVDTLG

SEQ ID NO: 8033 - protein, 7 aa, Artificial Sequence
  n-mer motif
HTYSQAD

SEQ ID NO: 8034 - protein, 7 aa, Artificial Sequence
  n-mer motif
TAPSVGS

SEQ ID NO: 8035 - protein, 7 aa, Artificial Sequence
  n-mer motif
NVGTDRD

SEQ ID NO: 8036 - protein, 7 aa, Artificial Sequence
  n-mer motif
GINRTSE

SEQ ID NO: 8037 - protein, 7 aa, Artificial Sequence
  n-mer motif
VETDSLI

SEQ ID NO: 8038 - protein, 7 aa, Artificial Sequence
  n-mer motif
HSAAGDG

SEQ ID NO: 8039 - protein, 7 aa, Artificial Sequence
  n-mer motif
DAGISSY

SEQ ID NO: 8040 - protein, 7 aa, Artificial Sequence
  n-mer motif
CTATKCS

SEQ ID NO: 8041 - protein, 7 aa, Artificial Sequence
  n-mer motif
RIDTLLV

SEQ ID NO: 8042 - protein, 7 aa, Artificial Sequence
  n-mer motif
VSQSHDV

SEQ ID NO: 8043 - protein, 7 aa, Artificial Sequence
  n-mer motif
ALPSHSS

SEQ ID NO: 8044 - protein, 7 aa, Artificial Sequence
  n-mer motif
GKPAEAP

SEQ ID NO: 8045 - protein, 7 aa, Artificial Sequence
  n-mer motif
WNSPGEA

SEQ ID NO: 8046 - protein, 7 aa, Artificial Sequence
  n-mer motif
RLERPDY

SEQ ID NO: 8047 - protein, 7 aa, Artificial Sequence
  n-mer motif
TRESLVD

SEQ ID NO: 8048 - protein, 7 aa, Artificial Sequence
  n-mer motif
RHEGPYS

SEQ ID NO: 8049 - protein, 7 aa, Artificial Sequence
  n-mer motif
VLSDKAF

SEQ ID NO: 8050 - protein, 7 aa, Artificial Sequence
  n-mer motif
TSATDSM

SEQ ID NO: 8051 - protein, 7 aa, Artificial Sequence
  n-mer motif
TEPLPMS

SEQ ID NO: 8052 - protein, 7 aa, Artificial Sequence
  n-mer motif
MPYVGTV

SEQ ID NO: 8053 - protein, 7 aa, Artificial Sequence
  n-mer motif
RDYSPTD

SEQ ID NO: 8054 - protein, 7 aa, Artificial Sequence
  n-mer motif
RNGGTTD

SEQ ID NO: 8055 - protein, 7 aa, Artificial Sequence
  n-mer motif
MMGATTK

SEQ ID NO: 8056 - protein, 7 aa, Artificial Sequence
  n-mer motif
AAVGGDT

SEQ ID NO: 8057 - protein, 7 aa, Artificial Sequence
  n-mer motif
LVNNDGT

SEQ ID NO: 8058 - protein, 7 aa, Artificial Sequence
  n-mer motif
SSTPQDT

SEQ ID NO: 8059 - protein, 7 aa, Artificial Sequence
  n-mer motif
SLRMENS

SEQ ID NO: 8060 - protein, 7 aa, Artificial Sequence
  n-mer motif
VQGQTGW

SEQ ID NO: 8061 - protein, 7 aa, Artificial Sequence
  n-mer motif
LGFTPQP

SEQ ID NO: 8062 - protein, 7 aa, Artificial Sequence
  n-mer motif
SVAKDQT

SEQ ID NO: 8063 - protein, 7 aa, Artificial Sequence
  n-mer motif
PRHELSN

SEQ ID NO: 8064 - protein, 7 aa, Artificial Sequence
  n-mer motif
KMGSNPA

SEQ ID NO: 8065 - protein, 7 aa, Artificial Sequence
  n-mer motif
EATHGSY

SEQ ID NO: 8066 - protein, 7 aa, Artificial Sequence
  n-mer motif
PEVACPG

SEQ ID NO: 8067 - protein, 7 aa, Artificial Sequence
  n-mer motif
VNTREVT

SEQ ID NO: 8068 - protein, 7 aa, Artificial Sequence
  n-mer motif
TARAIDM

SEQ ID NO: 8069 - protein, 7 aa, Artificial Sequence
  n-mer motif
TDGALGY

SEQ ID NO: 8070 - protein, 7 aa, Artificial Sequence
  n-mer motif
GSQYANR

SEQ ID NO: 8071 - protein, 7 aa, Artificial Sequence
  n-mer motif
EMGNQYP

SEQ ID NO: 8072 - protein, 7 aa, Artificial Sequence
  n-mer motif
PSTLAET

SEQ ID NO: 8073 - protein, 7 aa, Artificial Sequence
  n-mer motif
RIGVGAP

SEQ ID NO: 8074 - protein, 7 aa, Artificial Sequence
  n-mer motif
LSVKEEI

SEQ ID NO: 8075 - protein, 7 aa, Artificial Sequence
  n-mer motif
YTTHESG

SEQ ID NO: 8076 - protein, 7 aa, Artificial Sequence
  n-mer motif
LTAVLTV

SEQ ID NO: 8077 - protein, 7 aa, Artificial Sequence
  n-mer motif
LQTSVAT

SEQ ID NO: 8078 - protein, 7 aa, Artificial Sequence
  n-mer motif
TVRSPQP

SEQ ID NO: 8079 - protein, 7 aa, Artificial Sequence
  n-mer motif
HPDGTRP

SEQ ID NO: 8080 - protein, 7 aa, Artificial Sequence
  n-mer motif
GVTIGSR

SEQ ID NO: 8081 - protein, 7 aa, Artificial Sequence
  n-mer motif
TYASTEA

SEQ ID NO: 8082 - protein, 7 aa, Artificial Sequence
  n-mer motif
RSSPATN

SEQ ID NO: 8083 - protein, 7 aa, Artificial Sequence
  n-mer motif
IGSPLAN

SEQ ID NO: 8084 - protein, 7 aa, Artificial Sequence
  n-mer motif
ASTESHV

SEQ ID NO: 8085 - protein, 7 aa, Artificial Sequence
  n-mer motif
IAQNETY

SEQ ID NO: 8086 - protein, 7 aa, Artificial Sequence
  n-mer motif
MESKPWQ

SEQ ID NO: 8087 - protein, 7 aa, Artificial Sequence
  n-mer motif
LENPTPA

SEQ ID NO: 8088 - protein, 7 aa, Artificial Sequence
  n-mer motif
PNPSPRQ

SEQ ID NO: 8089 - protein, 7 aa, Artificial Sequence
  n-mer motif
STSNPPY

SEQ ID NO: 8090 - protein, 7 aa, Artificial Sequence
  n-mer motif
YLTDTPT

SEQ ID NO: 8091 - protein, 7 aa, Artificial Sequence
  n-mer motif
IRALMTD

SEQ ID NO: 8092 - protein, 7 aa, Artificial Sequence
  n-mer motif
PMGTDTV

SEQ ID NO: 8093 - protein, 7 aa, Artificial Sequence
  n-mer motif
TRTQGTS

SEQ ID NO: 8094 - protein, 7 aa, Artificial Sequence
  n-mer motif
SNNMNQA

SEQ ID NO: 8095 - protein, 7 aa, Artificial Sequence
  n-mer motif
EDSVNHI

SEQ ID NO: 8096 - protein, 7 aa, Artificial Sequence
  n-mer motif
SVVPTDK

SEQ ID NO: 8097 - protein, 7 aa, Artificial Sequence
  n-mer motif
VRGVQDA

SEQ ID NO: 8098 - protein, 7 aa, Artificial Sequence
  n-mer motif
HDVTVRN

SEQ ID NO: 8099 - protein, 7 aa, Artificial Sequence
  n-mer motif
HNNHAGE

SEQ ID NO: 8100 - protein, 7 aa, Artificial Sequence
  n-mer motif
GNMNHSI

SEQ ID NO: 8101 - protein, 7 aa, Artificial Sequence
  n-mer motif
GVHTHTV

SEQ ID NO: 8102 - protein, 7 aa, Artificial Sequence
  n-mer motif
FLPQLGQ

SEQ ID NO: 8103 - protein, 7 aa, Artificial Sequence
  n-mer motif
LANMSAP

SEQ ID NO: 8104 - protein, 7 aa, Artificial Sequence
  n-mer motif
VRRDETP

SEQ ID NO: 8105 - protein, 7 aa, Artificial Sequence
  n-mer motif
CRDNVLA

SEQ ID NO: 8106 - protein, 7 aa, Artificial Sequence
  n-mer motif
MLASRVP

SEQ ID NO: 8107 - protein, 7 aa, Artificial Sequence
  n-mer motif
VRTVLQQ

SEQ ID NO: 8108 - protein, 7 aa, Artificial Sequence
  n-mer motif
SNQNVDW

SEQ ID NO: 8109 - protein, 7 aa, Artificial Sequence
  n-mer motif
TEVTGDS

SEQ ID NO: 8110 - protein, 7 aa, Artificial Sequence
  n-mer motif
ESATSLK

SEQ ID NO: 8111 - protein, 7 aa, Artificial Sequence
  n-mer motif
NHPAPSS

SEQ ID NO: 8112 - protein, 7 aa, Artificial Sequence
  n-mer motif
YGNANTV

SEQ ID NO: 8113 - protein, 7 aa, Artificial Sequence
  n-mer motif
QNDKSDN

SEQ ID NO: 8114 - protein, 7 aa, Artificial Sequence
  n-mer motif
SQAQIRV

SEQ ID NO: 8115 - protein, 7 aa, Artificial Sequence
  n-mer motif
FQRDVGH

SEQ ID NO: 8116 - protein, 7 aa, Artificial Sequence
  n-mer motif
LMNRNAP

SEQ ID NO: 8117 - protein, 7 aa, Artificial Sequence
  n-mer motif
AGSSPSR

SEQ ID NO: 8118 - protein, 7 aa, Artificial Sequence
  n-mer motif
LFHSQMT

SEQ ID NO: 8119 - protein, 7 aa, Artificial Sequence
  n-mer motif
MMSNSLA

SEQ ID NO: 8120 - protein, 7 aa, Artificial Sequence
  n-mer motif
VTTVLQS

SEQ ID NO: 8121 - protein, 7 aa, Artificial Sequence
  n-mer motif
GSQRAMN

SEQ ID NO: 8122 - protein, 7 aa, Artificial Sequence
  n-mer motif
ASGARYV

SEQ ID NO: 8123 - protein, 7 aa, Artificial Sequence
  n-mer motif
KNYDSDS

SEQ ID NO: 8124 - protein, 7 aa, Artificial Sequence
  n-mer motif
VGSGVGV

SEQ ID NO: 8125 - protein, 7 aa, Artificial Sequence
  n-mer motif
RSDLTES

SEQ ID NO: 8126 - protein, 7 aa, Artificial Sequence
  n-mer motif
RAEFIDT

SEQ ID NO: 8127 - protein, 7 aa, Artificial Sequence
  n-mer motif
TSEMRTA

SEQ ID NO: 8128 - protein, 7 aa, Artificial Sequence
  n-mer motif
ELDHLSH

SEQ ID NO: 8129 - protein, 7 aa, Artificial Sequence
  n-mer motif
TQAGLAS

SEQ ID NO: 8130 - protein, 7 aa, Artificial Sequence
  n-mer motif
AAQHHDT

SEQ ID NO: 8131 - protein, 7 aa, Artificial Sequence
  n-mer motif
GGAHTRV

SEQ ID NO: 8132 - protein, 7 aa, Artificial Sequence
  n-mer motif
AYGIHEV

SEQ ID NO: 8133 - protein, 7 aa, Artificial Sequence
  n-mer motif
AMLRMEQ

SEQ ID NO: 8134 - protein, 7 aa, Artificial Sequence
  n-mer motif
TDRSRLG

SEQ ID NO: 8135 - protein, 7 aa, Artificial Sequence
  n-mer motif
EREPPKN

SEQ ID NO: 8136 - protein, 7 aa, Artificial Sequence
  n-mer motif
VVKEIKL

SEQ ID NO: 8137 - protein, 7 aa, Artificial Sequence
  n-mer motif
HTGQTPS

SEQ ID NO: 8138 - protein, 7 aa, Artificial Sequence
  n-mer motif
VSLSSPP

SEQ ID NO: 8139 - protein, 7 aa, Artificial Sequence
  n-mer motif
GAGNLGT

SEQ ID NO: 8140 - protein, 7 aa, Artificial Sequence
  n-mer motif
ARDDTIQ

SEQ ID NO: 8141 - protein, 7 aa, Artificial Sequence
  n-mer motif
GTYTNMP

SEQ ID NO: 8142 - protein, 7 aa, Artificial Sequence
  n-mer motif
MLGGFAQ

SEQ ID NO: 8143 - protein, 7 aa, Artificial Sequence
  n-mer motif
PSEMRAV

SEQ ID NO: 8144 - protein, 7 aa, Artificial Sequence
  n-mer motif
RISPENS

SEQ ID NO: 8145 - protein, 7 aa, Artificial Sequence
  n-mer motif
KMGGSQS

SEQ ID NO: 8146 - protein, 7 aa, Artificial Sequence
  n-mer motif
GLMAHVT

SEQ ID NO: 8147 - protein, 7 aa, Artificial Sequence
  n-mer motif
SRQTALT

SEQ ID NO: 8148 - protein, 7 aa, Artificial Sequence
  n-mer motif
SDLNLPP

SEQ ID NO: 8149 - protein, 7 aa, Artificial Sequence
  n-mer motif
YVSDYLH

SEQ ID NO: 8150 - protein, 7 aa, Artificial Sequence
  n-mer motif
TNDNSDR

SEQ ID NO: 8151 - protein, 7 aa, Artificial Sequence
  n-mer motif
YLMHDSA

SEQ ID NO: 8152 - protein, 7 aa, Artificial Sequence
  n-mer motif
GSRNGPT

SEQ ID NO: 8153 - protein, 7 aa, Artificial Sequence
  n-mer motif
KNGVIND

SEQ ID NO: 8154 - protein, 7 aa, Artificial Sequence
  n-mer motif
ESVANLK

SEQ ID NO: 8155 - protein, 7 aa, Artificial Sequence
  n-mer motif
ASDSTTP

SEQ ID NO: 8156 - protein, 7 aa, Artificial Sequence
  n-mer motif
LNVSSSK

SEQ ID NO: 8157 - protein, 7 aa, Artificial Sequence
  n-mer motif
EAKGFGH

SEQ ID NO: 8158 - protein, 7 aa, Artificial Sequence
  n-mer motif
GTSAESR

SEQ ID NO: 8159 - protein, 7 aa, Artificial Sequence
  n-mer motif
MHNLPSY

SEQ ID NO: 8160 - protein, 7 aa, Artificial Sequence
  n-mer motif
VFTEIES

SEQ ID NO: 8161 - protein, 7 aa, Artificial Sequence
  n-mer motif
TQTSTWT

SEQ ID NO: 8162 - protein, 7 aa, Artificial Sequence
  n-mer motif
PMNKDIL

SEQ ID NO: 8163 - protein, 7 aa, Artificial Sequence
  n-mer motif
KESEYRV

SEQ ID NO: 8164 - protein, 7 aa, Artificial Sequence
  n-mer motif
STNSEAV

SEQ ID NO: 8165 - protein, 7 aa, Artificial Sequence
  n-mer motif
DTANRST

SEQ ID NO: 8166 - protein, 7 aa, Artificial Sequence
  n-mer motif
PKAPLNN

SEQ ID NO: 8167 - protein, 7 aa, Artificial Sequence
  n-mer motif
LATYPSH

SEQ ID NO: 8168 - protein, 7 aa, Artificial Sequence
  n-mer motif
ATVQSVD

SEQ ID NO: 8169 - protein, 7 aa, Artificial Sequence
  n-mer motif
NSMGNGG

SEQ ID NO: 8170 - protein, 7 aa, Artificial Sequence
  n-mer motif
DHSEQNS

SEQ ID NO: 8171 - protein, 7 aa, Artificial Sequence
  n-mer motif
TFLPQLG

SEQ ID NO: 8172 - protein, 7 aa, Artificial Sequence
  n-mer motif
GFTNTSK

SEQ ID NO: 8173 - protein, 7 aa, Artificial Sequence
  n-mer motif
TMNYSHT

SEQ ID NO: 8174 - protein, 7 aa, Artificial Sequence
  n-mer motif
SIGFSVG

SEQ ID NO: 8175 - protein, 7 aa, Artificial Sequence
  n-mer motif
SENRAGN

SEQ ID NO: 8176 - protein, 7 aa, Artificial Sequence
  n-mer motif
SLNLHSV

SEQ ID NO: 8177 - protein, 7 aa, Artificial Sequence
  n-mer motif
HESHYVS

SEQ ID NO: 8178 - protein, 7 aa, Artificial Sequence
  n-mer motif
NVVNGMD

SEQ ID NO: 8179 - protein, 7 aa, Artificial Sequence
  n-mer motif
HSDKVSS

SEQ ID NO: 8180 - protein, 7 aa, Artificial Sequence
  n-mer motif
KSVGDGR

SEQ ID NO: 8181 - protein, 7 aa, Artificial Sequence
  n-mer motif
RQVEQSD

SEQ ID NO: 8182 - protein, 7 aa, Artificial Sequence
  n-mer motif
RELVNTD

SEQ ID NO: 8183 - protein, 7 aa, Artificial Sequence
  n-mer motif
NYRDITM

SEQ ID NO: 8184 - protein, 7 aa, Artificial Sequence
  n-mer motif
ASLDRLP

SEQ ID NO: 8185 - protein, 7 aa, Artificial Sequence
  n-mer motif
RQLASLP

SEQ ID NO: 8186 - protein, 7 aa, Artificial Sequence
  n-mer motif
VSKTKDS

SEQ ID NO: 8187 - protein, 7 aa, Artificial Sequence
  n-mer motif
NVYEGHR

SEQ ID NO: 8188 - protein, 7 aa, Artificial Sequence
  n-mer motif
LEQLRVP

SEQ ID NO: 8189 - protein, 7 aa, Artificial Sequence
  n-mer motif
MTYTSPT

SEQ ID NO: 8190 - protein, 7 aa, Artificial Sequence
  n-mer motif
NSHTDRG

SEQ ID NO: 8191 - protein, 7 aa, Artificial Sequence
  n-mer motif
VAGGTSE

SEQ ID NO: 8192 - protein, 7 aa, Artificial Sequence
  n-mer motif
VDAHRAN

SEQ ID NO: 8193 - protein, 7 aa, Artificial Sequence
  n-mer motif
RADMTPL

SEQ ID NO: 8194 - protein, 7 aa, Artificial Sequence
  n-mer motif
GHEQTDA

SEQ ID NO: 8195 - protein, 7 aa, Artificial Sequence
  n-mer motif
YIAGGDQ

SEQ ID NO: 8196 - protein, 7 aa, Artificial Sequence
  n-mer motif
YGDLTTV

SEQ ID NO: 8197 - protein, 7 aa, Artificial Sequence
  n-mer motif
RLDLQEH

SEQ ID NO: 8198 - protein, 7 aa, Artificial Sequence
  n-mer motif
HLNPAAQ

SEQ ID NO: 8199 - protein, 7 aa, Artificial Sequence
  n-mer motif
GVNEQTN

SEQ ID NO: 8200 - protein, 7 aa, Artificial Sequence
  n-mer motif
RRLSTDL

SEQ ID NO: 8201 - protein, 7 aa, Artificial Sequence
  n-mer motif
GSTGLPP

SEQ ID NO: 8202 - protein, 7 aa, Artificial Sequence
  n-mer motif
DDMVKNS

SEQ ID NO: 8203 - protein, 7 aa, Artificial Sequence
  n-mer motif
VIDLVTR

SEQ ID NO: 8204 - protein, 7 aa, Artificial Sequence
  n-mer motif
GGLTNGL

SEQ ID NO: 8205 - protein, 7 aa, Artificial Sequence
  n-mer motif
RMEETAY

SEQ ID NO: 8206 - protein, 7 aa, Artificial Sequence
  n-mer motif
TDISGYG

SEQ ID NO: 8207 - protein, 7 aa, Artificial Sequence
  n-mer motif
QVNHNTS

SEQ ID NO: 8208 - protein, 7 aa, Artificial Sequence
  n-mer motif
ATTEDVR

SEQ ID NO: 8209 - protein, 7 aa, Artificial Sequence
  n-mer motif
WSIKNQT

SEQ ID NO: 8210 - protein, 7 aa, Artificial Sequence
  n-mer motif
SPTSNTI

SEQ ID NO: 8211 - protein, 7 aa, Artificial Sequence
  n-mer motif
MKNSGFD

SEQ ID NO: 8212 - protein, 7 aa, Artificial Sequence
  n-mer motif
LVAERLP

SEQ ID NO: 8213 - protein, 7 aa, Artificial Sequence
  n-mer motif
GETNFPT

SEQ ID NO: 8214 - protein, 7 aa, Artificial Sequence
  n-mer motif
NGKLGTT

SEQ ID NO: 8215 - protein, 7 aa, Artificial Sequence
  n-mer motif
NLVAYTK

SEQ ID NO: 8216 - protein, 7 aa, Artificial Sequence
  n-mer motif
WQLTTSH

SEQ ID NO: 8217 - protein, 7 aa, Artificial Sequence
  n-mer motif
SLDLGGN

SEQ ID NO: 8218 - protein, 7 aa, Artificial Sequence
  n-mer motif
NESTKES

SEQ ID NO: 8219 - protein, 7 aa, Artificial Sequence
  n-mer motif
GFDGKQL

SEQ ID NO: 8220 - protein, 7 aa, Artificial Sequence
  n-mer motif
HLYISAD

SEQ ID NO: 8221 - protein, 7 aa, Artificial Sequence
  n-mer motif
LLPNNTH

SEQ ID NO: 8222 - protein, 7 aa, Artificial Sequence
  n-mer motif
SGMAGLS

SEQ ID NO: 8223 - protein, 7 aa, Artificial Sequence
  n-mer motif
ITSLPET

SEQ ID NO: 8224 - protein, 7 aa, Artificial Sequence
  n-mer motif
ELKESQK

SEQ ID NO: 8225 - protein, 7 aa, Artificial Sequence
  n-mer motif
NIVQDYP

SEQ ID NO: 8226 - protein, 7 aa, Artificial Sequence
  n-mer motif
SENTSVP

SEQ ID NO: 8227 - protein, 7 aa, Artificial Sequence
  n-mer motif
DPNQPKT

SEQ ID NO: 8228 - protein, 7 aa, Artificial Sequence
  n-mer motif
AGLDVNT

SEQ ID NO: 8229 - protein, 7 aa, Artificial Sequence
  n-mer motif
SHEMNNG

SEQ ID NO: 8230 - protein, 7 aa, Artificial Sequence
  n-mer motif
SYAINQS

SEQ ID NO: 8231 - protein, 7 aa, Artificial Sequence
  n-mer motif
GHLPAAK

SEQ ID NO: 8232 - protein, 7 aa, Artificial Sequence
  n-mer motif
ELGNKTA

SEQ ID NO: 8233 - protein, 7 aa, Artificial Sequence
  n-mer motif
LESTRKA

SEQ ID NO: 8234 - protein, 7 aa, Artificial Sequence
  n-mer motif
TQGNSEA

SEQ ID NO: 8235 - protein, 7 aa, Artificial Sequence
  n-mer motif
ISIDSAM

SEQ ID NO: 8236 - protein, 7 aa, Artificial Sequence
  n-mer motif
EFQRIRE

SEQ ID NO: 8237 - protein, 7 aa, Artificial Sequence
  n-mer motif
ASLSAPA

SEQ ID NO: 8238 - protein, 7 aa, Artificial Sequence
  n-mer motif
DSQITRL

SEQ ID NO: 8239 - protein, 7 aa, Artificial Sequence
  n-mer motif
GHENMGV

SEQ ID NO: 8240 - protein, 7 aa, Artificial Sequence
  n-mer motif
MSAGHPT

SEQ ID NO: 8241 - protein, 7 aa, Artificial Sequence
  n-mer motif
HAPSGAI

SEQ ID NO: 8242 - protein, 7 aa, Artificial Sequence
  n-mer motif
TTITNSV

SEQ ID NO: 8243 - protein, 7 aa, Artificial Sequence
  n-mer motif
PQHQHEH

SEQ ID NO: 8244 - protein, 7 aa, Artificial Sequence
  n-mer motif
QYSMDTR

SEQ ID NO: 8245 - protein, 7 aa, Artificial Sequence
  n-mer motif
LYEVGTP

SEQ ID NO: 8246 - protein, 7 aa, Artificial Sequence
  n-mer motif
GETMRHN

SEQ ID NO: 8247 - protein, 7 aa, Artificial Sequence
  n-mer motif
MTITVEP

SEQ ID NO: 8248 - protein, 7 aa, Artificial Sequence
  n-mer motif
AQHPERS

SEQ ID NO: 8249 - protein, 7 aa, Artificial Sequence
  n-mer motif
THVAKPD

SEQ ID NO: 8250 - protein, 7 aa, Artificial Sequence
  n-mer motif
MTANLVE

SEQ ID NO: 8251 - protein, 7 aa, Artificial Sequence
  n-mer motif
NRQRDFE

SEQ ID NO: 8252 - protein, 7 aa, Artificial Sequence
  n-mer motif
SNSADAG

SEQ ID NO: 8253 - protein, 7 aa, Artificial Sequence
  n-mer motif
GEYGASV

SEQ ID NO: 8254 - protein, 7 aa, Artificial Sequence
  n-mer motif
DGMVRST

SEQ ID NO: 8255 - protein, 7 aa, Artificial Sequence
  n-mer motif
NGQLLAN

SEQ ID NO: 8256 - protein, 7 aa, Artificial Sequence
  n-mer motif
SAGMTLD

SEQ ID NO: 8257 - protein, 7 aa, Artificial Sequence
  n-mer motif
DHVHLTY

SEQ ID NO: 8258 - protein, 7 aa, Artificial Sequence
  n-mer motif
TTLTQTD

SEQ ID NO: 8259 - protein, 7 aa, Artificial Sequence
  n-mer motif
VQLADGH

SEQ ID NO: 8260 - protein, 7 aa, Artificial Sequence
  n-mer motif
TDSSADS

SEQ ID NO: 8261 - protein, 7 aa, Artificial Sequence
  n-mer motif
AMNVRSD

SEQ ID NO: 8262 - protein, 7 aa, Artificial Sequence
  n-mer motif
GDISYRV

SEQ ID NO: 8263 - protein, 7 aa, Artificial Sequence
  n-mer motif
MGYVDSL

SEQ ID NO: 8264 - protein, 7 aa, Artificial Sequence
  n-mer motif
LYLAAAS

SEQ ID NO: 8265 - protein, 7 aa, Artificial Sequence
  n-mer motif
SSPDSYR

SEQ ID NO: 8266 - protein, 7 aa, Artificial Sequence
  n-mer motif
SYNVDLH

SEQ ID NO: 8267 - protein, 7 aa, Artificial Sequence
  n-mer motif
QHTAHPM

SEQ ID NO: 8268 - protein, 7 aa, Artificial Sequence
  n-mer motif
AVMATHP

SEQ ID NO: 8269 - protein, 7 aa, Artificial Sequence
  n-mer motif
ISPSASN

SEQ ID NO: 8270 - protein, 7 aa, Artificial Sequence
  n-mer motif
TLDNNHS

SEQ ID NO: 8271 - protein, 7 aa, Artificial Sequence
  n-mer motif
SGSYVAT

SEQ ID NO: 8272 - protein, 7 aa, Artificial Sequence
  n-mer motif
MAAPPEH

SEQ ID NO: 8273 - protein, 7 aa, Artificial Sequence
  n-mer motif
QTASGDT

SEQ ID NO: 8274 - protein, 7 aa, Artificial Sequence
  n-mer motif
ESKTVVI

SEQ ID NO: 8275 - protein, 7 aa, Artificial Sequence
  n-mer motif
TVLPQSD

SEQ ID NO: 8276 - protein, 7 aa, Artificial Sequence
  n-mer motif
PLNANGS

SEQ ID NO: 8277 - protein, 7 aa, Artificial Sequence
  n-mer motif
PLNTGLT

SEQ ID NO: 8278 - protein, 7 aa, Artificial Sequence
  n-mer motif
AITIIGT

SEQ ID NO: 8279 - protein, 7 aa, Artificial Sequence
  n-mer motif
NPSAISY

SEQ ID NO: 8280 - protein, 7 aa, Artificial Sequence
  n-mer motif
TEHEKST

SEQ ID NO: 8281 - protein, 7 aa, Artificial Sequence
  n-mer motif
AESQLAS

SEQ ID NO: 8282 - protein, 7 aa, Artificial Sequence
  n-mer motif
VLKGTFP

SEQ ID NO: 8283 - protein, 7 aa, Artificial Sequence
  n-mer motif
SFAEITT

SEQ ID NO: 8284 - protein, 7 aa, Artificial Sequence
  n-mer motif
PLNGRVT

SEQ ID NO: 8285 - protein, 7 aa, Artificial Sequence
  n-mer motif
SERPQSS

SEQ ID NO: 8286 - protein, 7 aa, Artificial Sequence
  n-mer motif
AQLQDSV

SEQ ID NO: 8287 - protein, 7 aa, Artificial Sequence
  n-mer motif
PNRVTAP

SEQ ID NO: 8288 - protein, 7 aa, Artificial Sequence
  n-mer motif
ALIVSSM

SEQ ID NO: 8289 - protein, 7 aa, Artificial Sequence
  n-mer motif
AHGAFPV

SEQ ID NO: 8290 - protein, 7 aa, Artificial Sequence
  n-mer motif
EAYQTEK

SEQ ID NO: 8291 - protein, 7 aa, Artificial Sequence
  n-mer motif
AAASPLA

SEQ ID NO: 8292 - protein, 7 aa, Artificial Sequence
  n-mer motif
PQATLNN

SEQ ID NO: 8293 - protein, 7 aa, Artificial Sequence
  n-mer motif
TRGDMEF

SEQ ID NO: 8294 - protein, 7 aa, Artificial Sequence
  n-mer motif
SNLGEAS

SEQ ID NO: 8295 - protein, 7 aa, Artificial Sequence
  n-mer motif
GITGSPG

SEQ ID NO: 8296 - protein, 7 aa, Artificial Sequence
  n-mer motif
GFETSSP

SEQ ID NO: 8297 - protein, 7 aa, Artificial Sequence
  n-mer motif
PARSDAL

SEQ ID NO: 8298 - protein, 7 aa, Artificial Sequence
  n-mer motif
HANYVEV

SEQ ID NO: 8299 - protein, 7 aa, Artificial Sequence
  n-mer motif
VTRSTKE

SEQ ID NO: 8300 - protein, 7 aa, Artificial Sequence
  n-mer motif
DVALRSN

SEQ ID NO: 8301 - protein, 7 aa, Artificial Sequence
  n-mer motif
ESDLRQR

SEQ ID NO: 8302 - protein, 7 aa, Artificial Sequence
  n-mer motif
PLLAANP

SEQ ID NO: 8303 - protein, 7 aa, Artificial Sequence
  n-mer motif
INAAHRP

SEQ ID NO: 8304 - protein, 7 aa, Artificial Sequence
  n-mer motif
ARRDVNS

SEQ ID NO: 8305 - protein, 7 aa, Artificial Sequence
  n-mer motif
SMDKVEK

SEQ ID NO: 8306 - protein, 7 aa, Artificial Sequence
  n-mer motif
NVSARET

SEQ ID NO: 8307 - protein, 7 aa, Artificial Sequence
  n-mer motif
LTTAGMW

SEQ ID NO: 8308 - protein, 7 aa, Artificial Sequence
  n-mer motif
ARAEGVF

SEQ ID NO: 8309 - protein, 7 aa, Artificial Sequence
  n-mer motif
PSDHMRT

SEQ ID NO: 8310 - protein, 7 aa, Artificial Sequence
  n-mer motif
SRTVILS

SEQ ID NO: 8311 - protein, 7 aa, Artificial Sequence
  n-mer motif
QSNAAEG

SEQ ID NO: 8312 - protein, 7 aa, Artificial Sequence
  n-mer motif
WTETAAH

SEQ ID NO: 8313 - protein, 7 aa, Artificial Sequence
  n-mer motif
KENQLSK

SEQ ID NO: 8314 - protein, 15 aa, Artificial Sequence
  Linker
GGGGGGGGGGGGGGG
